(19) United States
(12) Patent Application Publication
(10) Pub. No.: US 2021/0261647 A1
(43) Pub. Date: Aug. 26, 2021

(54) LAMP CONSTRUCTS COMPRISING ALLERGENS

(71) Applicant: IMMUNOMIC THERAPEUTICS, INC, Rockville, MD (US)

(72) Inventor: Teri HEILAND, New Market, MD (US)

(73) Assignee: Immunomic Therapeutics, Inc, Rockville, MD (US)

(21) Appl. No.: 17/053,784

(22) PCT Filed: May 14, 2019
(86) PCT No.: PCT/US2019/032305

§ 371 Date: Nov. 8, 2020

Related U.S. Application Data
(60) Provisional application No. 62/673,932, filed on May 20, 2018.
(60) Provisional application No. 62/672,378, filed on May 16, 2018.
(60) Provisional application No. 62/672,005, filed on May 15, 2018.

(51) Int. Cl. C07K 14/705; C07K 14/415; A61K 39/35; A61P 37/08; A61K 39/36; C07K 14/47; C07K 14/435

(52) U.S. Cl. CPC C07K 14/70596; C07K 14/415; A61K 39/35; A61P 37/08; A61K 39/36; C07K 14/47; A61K 2039/545; C07K 14/43509; C07K 14/4359; C07K 14/43572; C07K 14/43568; C07K 2319/00; C07K 14/43531

(57) ABSTRACT

The present invention provides improved LAMP Constructs comprising specific fragments of the LAMP lumenal domain to deliver allergens to immune cells for enhanced processing. These LAMP Constructs can be used for the treatment of disease and in particular allergic reactions and/or allergies. The improved LAMP Constructs allow for presentation of properly configured three dimensional epitopes for production of an immune response when administered to a subject. The improved LAMP Constructs can be multivalent molecules, and/or can be provided as part of a multivalent vaccine containing two or more LAMP Constructs.

### BACKGROUND OF THE INVENTION

### Field of the Invention

[0001] The invention relates to improved LAMP Constructs comprising allergens and their use in treating subjects suffering from allergic reactions and/or allergies. More specifically, the invention relates to nucleic acids for use as DNA vaccines, and methods of using them to treat subjects suffering from or susceptible to allergic reactions. Prime boost protocols utilizing the improved LAMP Constructs described herein are also described.

### Discussion of the Related Art

[0002] In the following discussion, certain articles and methods will be described for background and introductory purposes. Nothing contained herein is to be construed as an “admission” of prior art. Applicant expressly reserves the right to demonstrate, where appropriate, that the articles and methods referenced herein do not constitute prior art under the applicable statutory provisions.

[0003] Allergic reactions occur when the immune system reacts to harmless foreign substances, called allergens. For example, food allergies are an important public health issue due to the high risk of anaphylaxis, a potentially deadly systemic shock (Sampson et al. (1992) N. Engl. J. Med. 327:380-384; Bock et al. (2001) J. Allergy Clin. Immunol. 107:191-193). Young children are at greater risk of developing food allergies than the general public (Lack et al. (2003) N. Engl. J. Med 348:977-985; Zimmerman et al. (1989) J. Allergy Clin. Immunol. 83:764-770; Green et al. (2007) Pediatrics 120:1304-1310). During the first three years of life, 6-8% of children experience an allergic reaction caused by food (Bock (1987) Allergy 45:587-596; Burks and Sampson (1993) Curr. Prob. Pediatr. 23:230-252; Jansen et al. (1994) J. Allergy Clin. Immunol. 93;2:446-456; Sampson (1999) J. Allergy Clin. Immunol. 103;5:717-728). Nut allergies, e.g., peanut and nut allergies, affect up to 1-2% of the population, and the rate of occurrence of this food allergy is thought to be increasing in the general population, disproportionately affecting those of Asian ethnicity.

[0004] Anaphylaxis caused by exposure to an allergen, e.g., tree nuts or peanuts, results in a severe immune reaction characterized by overproduction of histamine and is responsible for half of U.S. anaphylaxis emergency room visits annually. For example, extreme reactions to nuts result in over 30,000 incidents of anaphylaxis and between 100-200 deaths in the U.S. each year. Nuts in trace amounts are commonly found in thousands of individually branded, but not labeled, packaged food items. More than one and a half million Americans suffer symptoms from nut allergy and symptoms often persist throughout life. Many experience dangerous reactions on exposure to trace amounts.

[0005] There is no treatment for relieving nut allergy symptoms. Over the last ten years, the prevalence of nut allergies has doubled to affect 2% of adult Americans (Sampson (1999) J. Allergy Clin. Immunol. 103;5:717-728; Sicherer et al. (2003) J. Allergy Clin. Immunol. 112:1203-1207). While the symptoms for many other allergies like hay fever and short ragweed pollen are not life threatening, for a nut allergic individual, the ingestion of as little as 1/1000th of a nut can induce anaphylactic shock and death (Taylor et al. (2002) J. Allergy Clin. Immunol. 109 (1):24-30; Wensing et al. (2002) J. Allergy Clin. Immunol. 110(6):915-920). In the event that accidental ingestion triggers anaphylaxis, injections of epinephrine are used to open up airway passages (Stark and Sullivan (1986) J. Allergy Clin. Immunol. 78:76-83; Sampson (2003) Pediatrics 111(6):1601-1608).

[0006] Food allergies occur when an individual fails to develop oral tolerance and instead becomes sensitized to subsequent allergen exposure (Till et al. (2004) J. Allergy Clin. Immunol. 113(6):1025-1034). In allergic patients, allergens preferentially activate type 2 helper CD4+T lymphocytes (Th2), which produce the pro-allergic cytokines interleukin IL-4, IL-5, and IL-13 that help orchestrate inflammation underlying most allergic symptoms (Woodfolk (2007) J. Allergy Clin. Immunol. 118(2):260-294). IL-4 instructs antibody-producing B cells to secrete allergen-specific Immunoglobulin (Ig) E (Del Prete et al. (1988) J. Immunol. 140:4193-4198; Swain et al. (1990) J. Immunol. 145:3796-3806). Unlike neutralizing IgG, IgE binds to its high affinity receptor Fc-ϵR 1 expressed by mast cells and eosinophils (Blank et al. (1989) Nature 337:187-190; Benhamou et al. (1990) J. Immunol. 144:3071-3077), thus sensitizing these cells. Upon subsequent exposure, IgE binds the offending allergen, cross-links, and transduces a signal instructing mast cells to degranulate and release the volatile chemicals that trigger the allergic reaction.

[0007] Beside food allergies, other environmental agents can also generate an allergic response as described above in an individual. Examples of such environmental agents include, but are not limited to, pollen, dog dander, cat saliva, or dust mites.

[0008] Immunotherapy, the administration of increasing doses of an allergen to bring about tolerance, is a standard treatment for allergic diseases, but has not been approved for treating nut allergies due to frequent anaphylactic reactions (Nelson et al. (1997) J. Allergy Clin. Immunol 99;6:744-751; Oppenheimer et al. (1992) J. Allergy Clin. Immunol 90:256-262). In addition, the utility of immunotherapy is limited by the length of treatment, which requires up to 36 months of weekly or bi-weekly injections and results in varying degrees of success and compliance (Bousquet et al. (1998) J. Allergy Clin. Immunol 102:558-562; Rank and Li (2007) Mayo Clin. Proc. 82(9):1119-1123; Ciprandi et al. (2007) Allergy Asthma Proc. 28:40-43).

[0009] DNA vaccines have been proposed as a treatment of allergic disease (Raz et al., 1996; Hartl et al., 2004; Hsu et al., 1996; Crameri 2007; Weiss et al., 2006). The underlying rationale is that allergen protein encoded by a DNA vaccine will preferentially activate the allergen-specific Th1 cellular response with the production of interferons by APCs, natural killer (NK), and T cells, rather than the characteristic Th2-type response, such as secretion of IL-4, IL-5, and IL-13, and the formation of IgE by B lymphocytes and the maturation and recruitment of eosinophils in late-phase reactions. However, the mechanisms underlying the differential induction of the Th 1 and Th2 T-cell phenotypes appear to involve a large number of factors, such as unique properties of the bacterial DNA of vaccine preparations, e.g., unmethylated and CpG DNA residues, the cytokine milieu elicited by innate immunity, and the cellular trafficking properties of the allergens (Chen et al., 2001; Kaech et al., 2002).

[0010] DNA vaccines are new and promising candidates for the development of both prophylactic and therapeutic vaccines. They are proven to be safe and the lack of immune responses to a vector backbone may be a definitive advantage if repetitive cycles of vaccination are required to achieve clinical benefits. However, one perceived disadvantage of conventional DNA vaccines is their low immunogenicity in humans. A key limiting step in the immunogenicity of epitope-based DNA vaccines may be the access of epitopes to the MHCII presentation pathway to T cells, which is likely a stochastic process in the case of a vaccine without targeting technology.

[0011] U.S. Pat. No. 5,633,234 describes chimeric proteins comprising an antigenic domain of modified influenza hemagglutinin (HA) and a cytoplasmic endosomal/lysosomal targeting signal which effectively target antigens to that compartment. The antigenic domain was processed and peptides from it presented on the cell surface in association with major histocompatibility (MHC) class II molecules. The cytoplasmic tail of LAMP-1 was used to form the endosomal/lysosomal targeting domain of the chimeric protein.

[0012] U.S. Pat. No. 8,318,173 extended these initial observations to describe chimeric proteins (and the corresponding DNAs that encode these proteins) comprising the HIV-1 Gag protein inserted between the full lumenal domain and a transmembrane domain of LAMP-1. This construct was introduced into dendritic cells which were then reported to target the MHC II pathway.

[0013] This approach has proved useful in increasing cellular and humoral responses to several virus antigens, human papillomavirus E7, dengue virus membrane protein, HIV-1 gp160 membrane protein, HIV-1 p55 Gag, West Nile membrane protein, hepatitis C virus NS3 protein and cytomegalovirus pp65 (see, e.g., Bonini, et al., J. Immunol. 166: 5250-5257, 2001). The enhanced immune response can be attributed to co-localization of LAMP with MHC II and the more efficient processing and delivery of antigenic peptides. In addition, LAMP-targeting is reported to result in the presentation of an increased number of immunogenic epitopes, thus inducing a qualitatively broadened immune response compared to untargeted antigen. For example, Fernandes et al., 2000, Eur. J. Immunol. 30(8): 2333-43, demonstrated an increase in the number of presented peptides of a LAMP-trafficked OVA antigen encoded in a vaccinia vector. Of 12 peptides generated from exogenously supplied OVA, 9 were presented by an OVA/LAMP chimera, as compared to only 2 by the construct without LAMP.

[0014] While it has been determined that the cytoplasmic domain of LAMP is necessary (in conjunction with a signal sequence and transmembrane domain), it is not always sufficient for endosomal/lysosomal trafficking of all antigens. Instead, the full lumenal domain of LAMP has been shown to be also required for the trafficking of proteins to the lysosomal vesicular pathway.

[0015] However, even with the presence of the complete lumenal domain and the complete transmembrane/cytoplasmic tail of LAMP (“complete LAMP Constructs”), it has increasingly been found that the efficacy of a particular antigen to raise an immune response is highly dependent on the particular sequence used in these constructs. In fact, different antigenic fragments of the same protein when inserted into the complete LAMP constructs have been found to not elicit the same immune response. Sometimes the antigen fragment generates an immune response and other times it does not. These observations make the ability to predict ahead of time which particular antigenic sequence from a protein of interest will raise an immune response difficult with the complete LAMP Constructs.

[0016] Moreover, in generating the complete LAMP Constructs, it has been repeatedly observed that the full lumenal domain is required to properly express and process an antigen. For example, in Godinho et al., PLoS ONE 9(6): 9(6): e99887. doi:10.1371/journal.pone.0099887, the authors reported that the complete and intact lumenal domain was the necessary minimal region needed to target an antigen to the lysosomes and that fragments of the lumenal domain did not work. See, id. at page 6.

[0017] Specifically, the Godinho authors showed that by completely removing the first luminal domain and some of the second luminal domain (i.e., T1-Lum/gag construct), both protein expression and antibody response is decreased. Similarly, removing 25% of first luminal domain but having an intact second luminal domain (i.e., T2-lum/gag), both protein expression and antibody response comparatively increased but still less than the results obtained with the complete LAMP construct.

[0018] Moreover, the authors acknowledged that the ability to raise an immune response is dependent upon the particular antigen and the epitopes used in these complete LAMP Constructs. For example, on page 9, column 2, the authors state “accordingly, previous studies demonstrated that DNA vaccines that generate Gag secreted as VLP, or in a soluble form, induce different levels of T and B cell activation, which were also different from the response induced by cytoplasmic Gag.” Moreover, insertion of an antigenic sequence between the full lumenal domain of LAMP and the full transmembrane/cytoplasmic domain of LAMP as has been described in the literature can result in such large polynucleotide sequences that it can become either too costly to produce at commercial levels or impractical from a scientific perspective.

[0019] Thus, there is a need to design new and improved LAMP Constructs that can be used as vaccines to effectively treat, for example, allergic reactions and/or allergies. Moreover, once improved, these new LAMP Constructs can be used to generate antibodies directed to the allergens as described herein.

### SUMMARY OF THE INVENTION

[0020] This Summary is provided to introduce a selection of concepts in a simplified form that are further described below in the Detailed Description. This Summary is not intended to identify key or essential features of the claimed subject matter, nor is it intended to be used to limit the scope of the claimed subject matter. Other features, details, utilities, and advantages of the claimed subject matter will be apparent from the following written Detailed Description including those aspects illustrated in the accompanying drawings and defined in the appended claims.

[0021] It is an object of this invention to provide novel constructs (“improved LAMP Constructs”) comprising specific fragments and/or variants of LAMP domains that effectively present the allergens specified herein to the immune system to generate an enhanced immune response. These improved LAMP Constructs effectively direct the allergens to the lysosomal/endosomal compartment where they are processed and presented to major histocompatibility complex (MHC) class II molecules so that helper T cells are preferentially stimulated and/or antibodies are generated.

[0022] The improved LAMP Constructs and methods described herein may elicit an immune response in a subject. The immune response may be an immune response to the epitopes of the Allergen X (SEQ ID NO:Y) in the improved LAMP Construct (e.g., vaccine). Vaccines arm the immune system of the subject such that the immune system may detect and destroy that which contains the Allergen X (SEQ ID NO:Y) of the vaccines in the subject. The improved LAMP Constructs and methods described herein may elicit a Th1 immune response in the subject. Th1 immune responses may include secretion of inflammatory cytokines (e.g., IFNγ, TNFα) by a subset of immune cells (e.g., allergen specific T-cells).

[0023] In some cases, the Allergen X (SEQ ID NO:Y) used in the improved LAMP Constructs and methods described herein may be recognized by the immune system of a subject to elicit a Th1 immune response and release Type I cytokines. The Th1 response may be initiated by the interaction between the epitope and the T-cell, more specifically, the major histocompatibility complex (MHC) expressed by the T-cell. For example, high affinity binding of an epitope to an MHC receptor may stimulate a Th1 response. MHC receptors may be at least one of a plurality of types of MHC receptors. The MHC receptors engaged on a T-cell may vary across individuals in a population.

[0024] In some cases, the immune response is a Type 1 immune response. In some cases, the immune response is characterized by a ratio of Type I cytokine production to Type II cytokine production that is greater than 1. In some cases, the immune response is characterized by a ratio of Type I cytokine production to Type II cytokine production that is less than 1. In some cases, the immune response is characterized by a ratio of IFNγ production to IL-10 production that is greater than 1. In some cases, the immune response is characterized by a ratio of IFNγ production to IL-10 production that is less than 1.

[0025] Prime boost protocols are also contemplated. For example, the invention further provides a method for generating an immune response in a subject to an Allergen X (SEQ ID NO:Y), comprising priming the subject with an improved LAMP Construct comprising an Allergen X (SEQ ID NO:Y) as described herein followed by at least one boosting of the subject with the allergen or a related allergen (e.g., a second allergen derived from the same or highly similar protein sequence). Mixtures of allergens can be used in either or both the priming and the boosting step. Use of an improved LAMP Construct for the prime step followed by an Allergen X (SEQ ID NO:Y) boost step has been shown to significantly produce higher titers, indicating the power of LAMP in enhancing antibody response.

[0026] The invention further provides a nucleic acid molecule encoding any of the improved LAMP Constructs comprising the Allergen X (SEQ ID NO:Y) described herein. The improved LAMP Construct can comprise a nucleic acid wherein the nucleic acid molecule is operably linked to an expression control sequence. In one preferred aspect, the improved LAMP Construct is a vaccine vector, suitable for vaccinating a patient. In another aspect, the invention provides a delivery vehicle comprising the improved LAMP Construct for facilitating the introduction of the nucleic acid molecule encoding the allergen into a cell. The delivery vehicle may be lipid-based (e.g., a liposome formulation), viral-based (e.g., comprising viral proteins encapsulating the nucleic acid molecule), or cell-based.

[0027] In preferred embodiments, the invention provides an injectable composition comprising an improved LAMP Construct comprising an Allergen X (SEQ ID NO:Y) of interest for eliciting an immune response (e.g., generation of antibodies) in a mammal to the allergen. In preferred embodiments, this vaccine generates a preferential Th1 response to a Th2 response. The improved LAMP Constructs comprise at least one epitope of an Allergen X (SEQ ID NO:Y) as described herein.

[0028] The invention also provides a cell comprising any of the improved LAMP Constructs described herein. In one aspect, the cell is an antigen presenting cell. The antigen presenting cell may be a professional antigen presenting cell (e.g., a dendritic cell, macrophage, B cell, and the like) or an engineered antigen presenting cell (e.g., a non-professional antigen presenting cell engineered to express molecules required for antigen presentation, such as MHC class II molecules). The molecules required for antigen presentation may be derived from other cells, e.g., naturally occurring, or may themselves be engineered (e.g. mutated or modified to express desired properties, such as higher or lower affinity for an allergenic epitope). In one aspect, the antigen presenting cell does not express any co-stimulatory signals.

[0029] The invention additionally provides a kit comprising a plurality of cells comprising any of the improved LAMP Constructs described herein. At least two of the cells express different MHC class II molecules, and each cell comprises the same LAMP Construct. In one aspect, a kit is provided comprising an improved LAMP Construct and a cell for receiving the vector.

[0030] The invention also provides a transgenic animal comprising at least one of the cells and/or at least one of the improved LAMP Constructs described herein. The invention also provides a transgenic animal comprising at least one of the cells described herein.

[0031] The invention further provides a method for generating an immune response in an animal (e.g., a human or a non-human vertebrate) to an Allergen X (SEQ ID NO:Y), comprising: administering to the animal a cell as described above, wherein the cell expresses, or can be induced to express, the improved LAMP Construct in the animal. In one aspect, the cell comprises an MHC class II molecule compatible with MHC proteins of the animal, such that the animal does not generate an immune response against the MHC class II molecule. In one preferred aspect, the animal is a human.

[0032] In one further aspect, the invention provides a method for eliciting an immune response to an Allergen X (SEQ ID NO:Y), comprising administering to an animal, such as a human or a non-human vertebrate, any of the improved LAMP Constructs described herein. Preferably, the improved LAMP Construct is infectious for a cell of the animal. For example, the improved LAMP Construct may be a viral vector, such as a vaccinia improved LAMP Construct.

[0033] For example, the invention further provides a method for generating an immune response in an animal to an Allergen X (SEQ ID NO:Y), comprising priming the animal with an improved LAMP Construct comprising an Allergen X (SEQ ID NO:Y) as described herein followed by at least one boosting of the animal. Use of an improved LAMP Construct for the prime step followed by an Allergen X (SEQ ID NO:Y) boost step has been shown to significantly produce higher titers, indicating the power of LAMP in enhancing antibody response.

[0034] In a further aspect, a cell is obtained from a patient, the improved LAMP Construct described herein is introduced into the cell and the cell or progeny of the cell is reintroduced into the patient. In one aspect, the cell is a stem cell-capable of differentiating into an antigen presenting cell. Treatments of human patients as well as veterinary use are specifically contemplated.

[0035] Specifically, by combining presentation of the allergen of interest with LAMP, the allergen is then effectively transported to the cytoplasmic endosomal/lysosomal compartments, where the allergen can be processed and peptides from it presented on the cell surface in association with major histocompatibility (MHC) class II molecules.

[0036] These and other aspects, objects and features are described in more detail below.

### BRIEF DESCRIPTION OF THE FIGURES

[0037] The objects and features of the invention can be better understood with reference to the following detailed description and accompanying drawings.

[0038] FIG. 1 illustrates the general scheme of different types of improved LAMP Constructs (identified as ILC-1, ILC-2, ILC-3, ILC-4, ILC-5 and ILC-6) that can be used as described herein.

[0039] FIG. 2B illustrates the domains of the LAMP proteins defined herein while FIG. 2A defines the specific amino acid boundaries of these domains for human LAMP-1 (SEQ ID NO:1), human LAMP-2 (SEQ ID NO:2), human LAMP-3 (SEQ ID NO:3), human LIMP-2 (SEQ ID NO:4), human Endolyn (SEQ ID NO:5), human Macrosailin (SEQ ID NO:80), human LAMP-5 (SEQ ID NO:93) and human LIMBIC (SEQ ID NO:67). As described herein the LAMP lumenal domains, homology domains, transmembrane domains, the cytoplasmic tail and the signal sequences can be used to generate the improved LAMP Constructs ILC-1, ILC-2, ILC-3, ILC-4, ILC-5 and ILC-6 as described herein.

[0040] FIG. 3 provides alignment of LAMP-1 proteins found in other species as compared to human LAMP-1 (SEQ ID NO:1). The equivalent domains of these other species can be used to generate the improved LAMP Constructs described herein and are readily identifiable by comparing the domains identified for human LAMP-1 in FIGS. 2 and FIG. 3 to the alignments shown in FIG. 3.

[0041] FIG. 4 provides alignment of LAMP-2 proteins found in other species as compared to human LAMP-2 (SEQ ID NO:2). The equivalent domains of these other species can be used to generate the improved LAMP Constructs described herein and are readily identifiable by comparing the domains identified for human LAMP-2 in FIGS. 2 and FIG. 4 to the alignments shown in FIG. 4.

[0042] FIG. 5 provides alignment of LAMP-3 proteins found in other species as compared to human LAMP-3 (SEQ ID NO:3). The equivalent domains of these other species can be used to generate the improved LAMP Constructs described herein and are readily identifiable by comparing the domains identified for human LAMP-3 in FIGS. 2 and FIG. 5 to the alignments shown in FIG. 5.

[0043] FIG. 6 provides alignment of LIMP-2 proteins found in other species as compared to human LIMP-2 (SEQ ID NO:4). The equivalent domains of these other species can be used to generate the improved LAMP Constructs described herein and are readily identifiable by comparing the domains identified for human LIMP-2 in FIGS. 2 and FIG. 6 to the alignments shown in FIG. 6.

[0044] FIG. 7 provides alignment of LIMBIC proteins found in other species as compared to human LIMBIC (SEQ ID NO:67). The equivalent domains of these other species can be used to generate the improved LAMP Constructs described herein and are readily identifiable by comparing the domains identified for human LIMBIC in FIGS. 2 and FIG. 7 to the alignments shown in FIG. 7.

[0045] FIG. 8 provides alignment of Endolyn proteins found in other species as compared to human Endolyn (SEQ ID NO:5). The equivalent domains of these other species can be used to generate the improved LAMP Constructs described herein and are readily identifiable by comparing the domains identified for human Endolyn in FIGS. 2 and FIG. 8 to the alignments shown in FIG. 8.

[0046] FIG. 9 provides alignment of Macrosailin proteins found in other species as compared to human Macrosailin (SEQ ID NO:80). The equivalent domains of these other species can be used to generate the improved LAMP Constructs described herein and are readily identifiable by comparing the domains identified for human Macrosailin in FIGS. 2 and FIG. 9 to the alignments shown in FIG. 9.

[0047] FIG. 10 provides alignment of LAMP-5 proteins found in other species as compared to human LAMP-5 (SEQ ID NO:93). The equivalent domains of these other species can be used to generate the improved LAMP Constructs described herein and are readily identifiable by comparing the domains identified for human LAMP-S in FIGS. 2 and FIG. 10 to the alignments shown in FIG. 10.

[0048] FIG. 11 shows results obtained when mice were immunized with HVEM-LAMP, HVEM, or LAMP on day 0, 7, and 14. On day 28, mice were bled and serum samples were isolated. HVEM specific IgG was examined by ELISA. Data represent geometric mean of antibody titers ±geometric SD, n=6. ** p value <0.01

[0049] FIG. 12 shows results obtained when mice were immunized with HVEM-LAMP, HVEM, or LAMP on day 0, 7, and 14. On day 35, mice were boosted with 5 μg HVEM protein in the presence of alum adjuvant. Mice were bled on day 49 and serum samples were isolated. HVEM specific IgG was examined by ELISA. Data represent geometric mean of antibody titers±geometric SD, n=6. ***p value<0.001; **** p value <0.0001.

[0050] FIG. 13 shows that LAMP alters the binding affinity of epitopes in CRD3/4 of HVEM.

[0051] FIG. 14 is a schematic representation of the different constructs described herein as provided as Table 1/FIG. 14.

[0052] FIG. 15A and FIG. 15B is a Western Blot of allergens Amb a 1, Bet v 1, Fel d 4 expressed from different LAMP constructs and FIG. 15C is a Western Blot of allergen Cry J1/Cry J2. Protein expression for each allergen was demonstrated with anti-LAMP antibody (FIG. 15A and FIG. 15C). GAPDH detection was used to demonstrate equal loading between lanes (FIG. 15B).

[0053] FIG. 16 shows the results of Amb a 1 specific IgG ELISA.

[0054] FIG. 17 shows the results of Bet v 1 specific IgG ELISA.

[0055] FIG. 18 shows the results of Fel d 4 specific IgG ELISA

[0056] FIG. 19 shows the results of Cry J 1 specific IgG ELISA.

### DETAILED DESCRIPTION

[0057] The invention provides improved LAMP Constructs which can be used to generate vaccines. The improved LAMP Constructs can be used to modulate or enhance an immune response. In one preferred aspect, the invention provides a method for treating a patient with allergies and/or an allergic response by providing an improved LAMP Construct comprising one or more of the Allergen X (SEQ ID NO:Y) as described herein.

### DEFINITIONS

[0058] The following definitions are provided for specific terms which are used in the following written description.

[0059] As used in the specification and claims, the singular form “a”, “an” and “the” include plural references unless the context clearly dictates otherwise. For example, the term “a cell” includes a plurality of cells, including mixtures thereof. The term “a nucleic acid molecule” includes a plurality of nucleic acid molecules.

[0060] As used herein, the term “comprising” is intended to mean that the improved LAMP Constructs and methods include the recited elements, but do not exclude other elements. “Consisting essentially of”, when used to define improved LAMP Constructs and methods, shall mean excluding other elements of any essential significance to the combination. Thus, an improved LAMP Construct consisting essentially of the elements as defined herein would not exclude trace contaminants from the isolation and purification method and pharmaceutically acceptable carriers, such as phosphate buffered saline, preservatives, and the like. “Consisting of” shall mean excluding more than trace elements of other ingredients and substantial method steps for administering the improved LAMP Constructs of this invention. Embodiments defined by each of these transition terms are within the scope of this invention.

[0061] The term “about” or “approximately” means within an acceptable range for the particular value as determined by one of ordinary skill in the art, which will depend in part on how the value is measured or determined, e.g., the limitations of the measurement system. For example, “about” can mean a range of up to 20%, preferably up to 10%, more preferably up to 5%, and more preferably still up to 1% of a given value. Alternatively, particularly with respect to biological systems or processes, the term can mean within an order of magnitude, preferably within 5 fold, and more preferably within 2 fold, of a value. Unless otherwise stated, the term ‘about’ means within an acceptable error range for the particular value, such as ±1-20%, preferably ±1-10% and more preferably ±1-5%.

[0062] Where a range of values is provided, it is understood that each intervening value, between the upper and lower limit of that range and any other stated or intervening value in that stated range is encompassed within the invention. The upper and lower limits of these smaller ranges may independently be included in the smaller ranges, and are also encompassed within the invention, subject to any specifically excluded limit in the stated range. Where the stated range includes one or both of the limits, ranges excluding either both of those included limits are also included in the invention.

[0063] As used herein, “the lysosomal/endosomal compartment” refers to membrane-bound acidic vacuoles containing LAMP molecules in the membrane, hydrolytic enzymes that function in antigen processing, and MHC class II molecules for antigen recognition and presentation. This compartment functions as a site for degradation of foreign materials internalized from the cell surface by any of a variety of mechanisms including endocytosis, phagocytosis and pinocytosis, and of intracellular material delivered to this compartment by specialized autolytic phenomena (de Duve, Eur. J. Biochem. 137: 391, 1983). The term “endosome” as used herein and in the claims encompasses a lysosome.

[0064] As used herein, a “lysosome-related organelle” refers to any organelle which comprises lysosymes and includes, but is not limited to, MIIC, CIIV, melanosomes, secretory granules, lytic granules, platelet-dense granules, basophil granules, Birbeck granules, phagolysosomes, secretory lysosomes, and the like. Preferably, such an organelle lacks mannose 6-phosphate receptors and comprises LAMP, but may or may not comprise an MHC class II molecule. For reviews, see, e.g., Blott and Griffiths, Nature Reviews, Molecular Cell Biology, 2002; Dell'Angelica, et al., The FASEB Journal 14: 1265-1278, 2000.

[0065] As used herein, the terms “polynucleotide” and “nucleic acid molecule” are used interchangeably to refer to polymeric forms of nucleotides of any length. The polynucleotides may contain deoxyribonucleotides, ribonucleotides, and/or their analogs. Nucleotides may have any three-dimensional structure, and may perform any function, known or unknown. The term “polynucleotide” includes, for example, single-, double-stranded and triple helical molecules, a gene or gene fragment, exons, introns, mRNA, tRNA, rRNA, ribozymes, antisense molecules, cDNA, recombinant polynucleotides, branched polynucleotides, aptamers, plasmids, vectors, isolated DNA of any sequence, isolated RNA of any sequence, nucleic acid probes, and primers. A nucleic acid molecule may also comprise modified nucleic acid molecules (e.g., comprising modified bases, sugars, and/or internucleotide linkers).

[0066] As used herein, the term “peptide” refers to a compound of two or more subunit amino acids, amino acid analogs, or peptidomimetics. The subunits may be linked by peptide bonds or by other bonds (e.g., as esters, ethers, and the like).

[0067] As used herein, the term “amino acid” refers to either natural and/or unnatural or synthetic amino acids, including glycine and both D or L optical isomers, and amino acid analogs and peptidomimetics. A peptide of three or more amino acids is commonly called an oligopeptide if the peptide chain is short. If the peptide chain is long (e.g., greater than about 10 amino acids), the peptide is commonly called a polypeptide or a protein. While the term “protein” encompasses the term “polypeptide”, a “polypeptide” may be a less than full-length protein.

[0068] As used herein a “LAMP polypeptide” refers to the mammalian lysosomal associated membrane proteins human LAMP-1, human LAMP-2, human LAMP-3, human LIMP-2, human Endolyn, human LIMBIC, human LAMP-5, or human Macrosailin as described herein, as well as orthologs (such as, for example, the LAMP proteins shown in FIGS. 3-10), and allelic variants. As used herein, “expression” refers to the process by which polynucleotides are transcribed into mRNA and/or translated into peptides, polypeptides, or proteins. If the polynucleotide is derived from genomic DNA, expression may include splicing of the mRNA transcribed from the genomic DNA.

[0069] As used herein, “under transcriptional control” or “operably linked” refers to expression (e.g., transcription or translation) of a polynucleotide sequence which is controlled by an appropriate juxtaposition of an expression control element and a coding sequence. In one aspect, a DNA sequence is “operatively linked” to an expression control sequence when the expression control sequence controls and regulates the transcription of that DNA sequence.

[0070] As used herein, “coding sequence” is a sequence which is transcribed and translated into a polypeptide when placed under the control of appropriate expression control sequences. The boundaries of a coding sequence are determined by a start codon at the 5′ (amino) terminus and a translation stop codon at the 3′ (carboxyl) terminus. A coding sequence can include, but is not limited to, a prokaryotic sequence, cDNA from eukaryotic mRNA, a genomic DNA sequence from eukaryotic (e.g., mammalian) DNA, and even synthetic DNA sequences. A polyadenylation signal and transcription termination sequence will usually be located 3′ to the coding sequence.

[0071] As used herein, two coding sequences “correspond” to each other if the sequences or their complementary sequences encode the same amino acid sequences.

[0072] As used herein, “signal sequence” denotes the endoplasmic reticulum translocation sequence. This sequence encodes a signal peptide that communicates to a cell to direct a polypeptide to which it is linked (e.g., via a chemical bond) to an endoplasmic reticulum vesicular compartment, to enter an exocytic/endocytic organelle, to be delivered either to a cellular vesicular compartment, the cell surface or to secrete the polypeptide. This signal sequence is sometimes clipped off by the cell in the maturation of a protein. Signal sequences can be found associated with a variety of proteins native to prokaryotes and eukaryotes.

[0073] As used herein, “trafficking” denotes movement or progression of the polypeptide encoded by the improved LAMP Construct through cellular organelles or compartments in the pathway from the rough endoplasmic reticulum to the endosomal/lysosomal compartment or related organelles where antigen processing and binding to MHC II occurs.

[0074] Short stretches of polynucleotides that encode amino acids may be included at the ends of the polynucleotides that encode Allergen X to facilitate cloning into any of the vectors described herein. For example, use of cloning sequences that flank the amino acid sequence of SEQ ID NO:Y, such as, for example, polynucleotides that encode “Leu-Glu” and “Glu-Phe” (e.g., “CTCGAG” and “GAATTC”) may be included in the construct design.

[0075] As used herein, an “improved LAMP Construct” and an “improved LAMP Construct comprising an Allergen X (SEQ ID NO:Y)” and an “improved LAMP Construct comprising an allergen of interest” are used interchangeably. The different arrangements of the improved LAMP Constructs are illustrated in FIG. 1 as ILC1-ILC6. Moreover, the use of an “improved LAMP Construct” encompasses both the polynucleotide sequence of the improved LAMP Construct (which comprises a polynucleotide encoding Allergen X (SEQ ID NO:Y) as well as the protein encoded by the polynucleotide sequence of the improved LAMP Construct.

[0076] As used herein, an “improved LAMP Construct delivery vehicle” is defined as any molecule or group of molecules or macromolecules that can carry an improved LAMP Construct into a host cell (e.g., such as genes or gene fragments, antisense molecules, ribozymes, aptamers, and the like) and which occurs in association with an improved LAMP Construct as described herein.

[0077] As used herein, “improved LAMP Construct delivery,” or “improved LAMP Construct transfer,” refers to the introduction of the improved LAMP Construct into a host cell, irrespective of the method used for the introduction. The introduced improved LAMP Constructs may be stably or transiently maintained in the host cell. Stable maintenance typically requires that the introduced improved LAMP Construct either contains an origin of replication compatible with the host cell or integrates into a replicon of the host cell such as an extrachromosomal replicon (e.g., a plasmid) or a nuclear or mitochondrial chromosome.

[0078] As used herein, a “viral improved LAMP Construct” refers to a virus or viral particle that comprises the improved LAMP Construct to be delivered into a host cell, either in vivo, ex vivo or in vitro. Examples of viral improved LAMP Constructs include, but are not limited to, adenovirus vectors, adeno-associated virus vectors, retroviral vectors, and the like. In aspects where gene transfer is mediated by an adenoviral vector, an improved LAMP Construct includes the adenovirus genome or part thereof, and a selected, non-adenoviral gene, in association with adenoviral capsid proteins.

[0079] As used herein, “adenoviral-mediated gene transfer” or “adenoviral transduction” refers to the process by which an improved LAMP Construct is transferred into a host cell by virtue of the adenovirus entering the cell. Preferably, the improved LAMP Construct is able to replicate and/or integrate and be transcribed within the cell.

[0080] As used herein, “adenovirus particles” are individual adenovirus virions comprised of an external capsid and an improved LAMP Construct, where the capsid is further comprised of adenovirus envelope proteins. The adenovirus envelope proteins may be modified to comprise a fusion polypeptide which contains a polypeptide ligand covalently attached to the viral protein, e.g., for targeting the adenoviral particle to a particular cell and/or tissue type.

[0081] As used herein, the term “administering” or “immunizing” or “injecting” an improved LAMP Construct refers to transducing, transfecting, microinjecting, electroporating, or shooting the cell with the improved LAMP Construct. In some aspects, improved LAMP Constructs are introduced into a target cell by contacting the target cell with a delivery cell (e.g., by cell fusion or by lysing the delivery cell when it is in proximity to the target cell).

[0082] As used herein, the phrase “prime boost” describes the use of an improved LAMP Construct comprising an Allergen X (SEQ ID NO:Y) described herein used to prime a T-cell response followed by the use of a second improved LAMP Construct comprising an Allergen X (SEQ ID NO:Y), a DNA vaccine comprising an Allergen X (SEQ ID NO:Y) or a recombinant allergen to boost the response (or visa versa). These heterologous prime-boost immunizations elicit immune responses of greater height and breadth than can be achieved by priming and boosting with the same vector. The priming with an improved LAMP Construct comprising an Allergen X (SEQ ID NO:Y) initiates memory cells; the boost step expands the memory response. Preferably, two different agents that do not raise responses against each other are used and thus do not interfere with each other's activity. Mixtures of allergens are specifically contemplated in the prime and/or boost step. Boosting can occur once or multiple times.

[0083] As used herein, “hybridization” refers to a reaction in which one or more polynucleotides react to form a complex that is stabilized via hydrogen bonding between the bases of the nucleotide residues. The hydrogen bonding may occur by Watson-Crick base pairing, Hoogstein binding, or in any other sequence-specific manner. The complex may comprise two strands forming a duplex structure, three or more strands forming a multi-stranded complex, a single self-hybridizing strand, or any combination of these. A hybridization reaction may constitute a step in a more extensive process, such as the initiation of a PCR reaction, or the enzymatic cleavage of a polynucleotide by a ribozyme.

[0084] As used herein, a polynucleotide or polynucleotide region (or a polypeptide or polypeptide region) which has a certain percentage (for example, at least about 50%, at least about 60%, at least about 70%, at least about 80%, at least about 85%, at least about 90%, at least about 95%, at least about 99%) of “sequence identity” to another sequence means that, when maximally aligned, using software programs routine in the art, that percentage of bases (or amino acids) are the same in comparing the two sequences.

[0085] Two sequences are “substantially homologous” or “substantially similar” when at least about 50%, at least about 60%, at least about 70%, at least about 75%, and preferably at least about 80%, and most preferably at least about 90 or 95% of the nucleotides match over the defined length of the DNA sequences. Similarly, two polypeptide sequences are “substantially homologous” or “substantially similar” when at least about 50%, at least about 60%, at least about 66%, at least about 70%, at least about 75%, and preferably at least about 80%, and most preferably at least about 90 or 95% of the amino acid residues of the polypeptide match over a defined length of the polypeptide sequence. Sequences that are substantially homologous can be identified by comparing the sequences using standard software available in sequence data banks. Substantially homologous nucleic acid sequences also can be identified in a Southern hybridization experiment under, for example, stringent conditions as defined for that particular system. Defining appropriate hybridization conditions is within the skill of the art. For example, stringent conditions can be: hybridization at 5×SSC and 50% formamide at 42° C., and washing at 0.1×SSC and 0.1% sodium dodecyl sulfate at 60° C. Further examples of stringent hybridization conditions include: incubation temperatures of about 25 degrees C. to about 37 degrees C.; hybridization buffer concentrations of about 6×SSC to about 10×SSC; formamide concentrations of about 0% to about 25%; and wash solutions of about 6×SSC. Examples of moderate hybridization conditions include: incubation temperatures of about 40 degrees C. to about 50 degrees C.; buffer concentrations of about 9×SSC to about 2×SSC; formamide concentrations of about 30% to about 50%; and wash solutions of about 5×SSC to about 2×SSC. Examples of high stringency conditions include: incubation temperatures of about 55 degrees C. to about 68 degrees C.; buffer concentrations of about 1×SSC to about 0.1×SSC; formamide concentrations of about 55% to about 75%; and wash solutions of about 1×SSC, 0.1×SSC, or deionized water. In general, hybridization incubation times are from 5 minutes to 24 hours, with 1, 2, or more washing steps, and wash incubation times are about 1, 2, or 15 minutes. SSC is 0.15 M NaCl and 15 mM citrate buffer. It is understood that equivalents of SSC using other buffer systems can be employed. Similarity can be verified by sequencing, but preferably, is also or alternatively, verified by function (e.g., ability to traffic to an endosomal compartment, and the like), using assays suitable for the particular domain in question.

[0086] The terms “percent (%) sequence similarity”, “percent (%) sequence identity”, and the like, generally refer to the degree of identity or correspondence between different nucleotide sequences of nucleic acid molecules or amino acid sequences of polypeptides that may or may not share a common evolutionary origin (see Reeck et al., supra). Sequence identity can be determined using any of a number of publicly available sequence comparison algorithms, such as BLAST, FASTA, DNA Strider, GCG (Genetics Computer Group, Program Manual for the GCG Package, Version 7, Madison, Wis.), etc.

[0087] To determine the percent identity between two amino acid sequences or two nucleic acid molecules, the sequences are aligned for optimal comparison purposes. The percent identity between the two sequences is a function of the number of identical positions shared by the sequences (i.e., percent identity =number of identical positions/total number of positions (e.g., overlapping positions)×100). In one embodiment, the two sequences are, or are about, of the same length. The percent identity between two sequences can be determined using techniques similar to those described below, with or without allowing gaps. In calculating percent sequence identity, typically exact matches are counted.

[0088] The determination of percent identity between two sequences can be accomplished using a mathematical algorithm. A non-limiting example of a mathematical algorithm utilized for the comparison of two sequences is the algorithm of Karlin and Altschul, Proc. Natl. Acad. Sci. USA 1990, 87:2264, modified as in Karlin and Altschul, Proc. Natl. Acad. Sci. USA 1993, 90:5873-5877. Such an algorithm is incorporated into the NBLAST and XBLAST programs of Altschul et al, J. Mol. Biol. 1990; 215: 403. BLAST nucleotide searches can be performed with the NBLAST program, score=100, wordlength=12, to obtain nucleotide sequences homologous to sequences of the invention. BLAST protein searches can be performed with the XBLAST program, score=50, wordlength=3, to obtain amino acid sequences homologous to protein sequences of the invention. To obtain gapped alignments for comparison purposes, Gapped BLAST can be utilized as described in Altschul et al, Nucleic Acids Res. 1997, 25:3389. Alternatively, PSI-Blast can be used to perform an iterated search that detects distant relationship between molecules. See Altschul et al. (1997) supra. When utilizing BLAST, Gapped BLAST, and PSI-Blast programs, the default parameters of the respective programs (e.g., XBLAST and NBLAST) can be used. See ncbi.nlm.nih.gov/BLAST/ on the WorldWideWeb.

[0089] Another non-limiting example of a mathematical algorithm utilized for the comparison of sequences is the algorithm of Myers and Miller, CABIOS 1988; 4: 1 1-17. Such an algorithm is incorporated into the ALIGN program (version 2.0), which is part of the GCG sequence alignment software package. When utilizing the ALIGN program for comparing amino acid sequences, a PAM120 weight residue table, a gap length penalty of 12, and a gap penalty of 4 can be used.

[0090] In a preferred embodiment, the percent identity between two amino acid sequences is determined using the algorithm of Needleman and Wunsch (J. Mol. Biol. 1970, 48:444-453), which has been incorporated into the GAP program in the GCG software package (Accelrys, Burlington, Mass.; available at accelrys.com on the WorldWideWeb), using either a Blossum 62 matrix or a PAM250 matrix, a gap weight of 16, 14, 12, 10, 8, 6, or 4, and a length weight of 1, 2, 3, 4, 5, or 6. In yet another preferred embodiment, the percent identity between two nucleotide sequences is determined using the GAP program in the GCG software package using a NWSgapdna.CMP matrix, a gap weight of 40, 50, 60, 70, or 80, and a length weight of 1, 2, 3, 4, 5, or 6. A particularly preferred set of parameters (and the one that can be used if the practitioner is uncertain about what parameters should be applied to determine if a molecule is a sequence identity or homology limitation of the invention) is using a Blossum 62 scoring matrix with a gap open penalty of 12, a gap extend penalty of 4, and a frameshift gap penalty of 5.

[0091] Another non-limiting example of how percent identity can be determined is by using software programs such as those described in Current Protocols In Molecular Biology (F. M. Ausubel et al., eds., 1987) Supplement 30, section 7.7.18, Table 7.7.1. Preferably, default parameters are used for alignment. A preferred alignment program is BLAST, using default parameters. In particular, preferred programs are BLASTN and BLASTP, using the following default parameters: Genetic code=standard; filter=none; strand=both; cutoff=60; expect=10; Matrix=BLOSUM62; Descriptions=50 sequences; sort by=HIGH SCORE; Databases=non-redundant, GenBank+EMBL+DDBJ+PDB+GenBank CDS translations+SwissProtein+SPupdate+PIR. Details of these programs can be found at the following Internet address: http://www.ncbi.nlm.nih.gov/cgi-bin/BLAST.

[0092] Statistical analysis of the properties described herein may be carried out by standard tests, for example, t-tests, ANOVA, or Chi squared tests. Typically, statistical significance will be measured to a level of p=0.05 (5%), more preferably p=0.01, p=0.001, p=0.0001, p=0.000001

[0093] “Conservatively modified variants” of domain sequences also can be provided. With respect to particular nucleic acid sequences, conservatively modified variants refer to those nucleic acids which encode identical or essentially identical amino acid sequences, or where the nucleic acid does not encode an amino acid sequence, to essentially identical sequences. Specifically, degenerate codon substitutions can be achieved by generating sequences in which the third position of one or more selected (or all) codons is substituted with mixed-base and/or deoxyinosine residues (Batzer, et al., 1991, Nucleic Acid Res. 19: 5081; Ohtsuka, et al., 1985, J. Biol. Chem. 260: 2605-2608; Rossolini et al., 1994, Mol. Cell. Probes 8: 91-98).

[0094] The term “biologically active fragment”, “biologically active form”, “biologically active equivalent” of and “functional derivative” of a wild-type protein, possesses a biological activity that is at least substantially equal (e.g., not significantly different from) the biological activity of the wild type protein as measured using an assay suitable for detecting the activity.

[0095] As used herein, “in vivo” nucleic acid delivery, nucleic acid transfer, nucleic acid therapy” and the like, refer to the introduction of an improved LAMP Construct directly into the body of an organism, such as a human or non-human mammal, whereby the improved LAMP Construct is introduced to a cell of such organism in vivo.

[0096] As used herein, the term “in situ” refers to a type of in vivo nucleic acid delivery in which the improved LAMP Construct is brought into proximity with a target cell (e.g., the nucleic acid is not administered systemically). For example, in situ delivery methods include, but are not limited to, injecting an improved LAMP Construct directly at a site (e.g., into a tissue, such as a tumor or heart muscle), contacting the improved LAMP Construct with cell(s) or tissue through an open surgical field, or delivering the improved LAMP Constructs to a site using a medical access device such as a catheter.

[0097] As used herein, the term “isolated” or “purified” means separated (or substantially free) from constituents, cellular and otherwise, in which the polynucleotide, peptide, polypeptide, protein, antibody, or fragments thereof, are normally associated with in nature. For example, with respect to an improved LAMP Construct, an isolated polynucleotide is one that is separated from the 5′ and 3′ sequences with which it is normally associated in the chromosome. As is apparent to those of skill in the art, a non-naturally occurring polynucleotide, peptide, polypeptide, protein, antibody, or fragments thereof, does not require “isolation” to distinguish it from its naturally occurring counterpart. By substantially free or substantially purified, it is meant at least 50% of the population, preferably at least 70%, more preferably at least 80%, and even more preferably at least 90%, are free of the components with which they are associated in nature.

[0098] As used herein, a “target cell” or “recipient cell” refers to an individual cell or cell which is desired to be, or has been, a recipient of the improved LAMP Constructs described herein. The term is also intended to include progeny of a single cell, and the progeny may not necessarily be completely identical (in morphology or in genomic or total DNA complement) to the original parent cell due to natural, accidental, or deliberate mutation. A target cell may be in contact with other cells (e.g., as in a tissue) or may be found circulating within the body of an organism.

[0099] As used herein, a “subject” is a vertebrate, preferably a mammal, more preferably a human. Mammals include, but are not limited to, murines, simians, humans, farm animals, sport animals, and pets. In other preferred embodiments, the “subject” is a rodent (e.g. a rat, a mouse, a rabbit, a llama, camels, a cow, a guinea pig, a hamster, a dog, a cat, a horse, a non-human primate, a simian (e.g. a monkey or ape), a monkey (e.g. marmoset, baboon, rhesus macaque), or an ape (e.g. gorilla, chimpanzee, orangutan, gibbon). In other embodiments, non-human mammals, especially mammals that are conventionally used as models for demonstrating therapeutic efficacy in humans (e.g. murine, primate, porcine, canine, or rabbit animals) may be employed.

[0100] As used herein, the term “pharmaceutically acceptable carrier” encompasses any of the standard pharmaceutical carriers, such as a phosphate buffered saline solution, water, and emulsions, such as an oil/water or water/oil emulsion, and various types of wetting agents. Compositions comprising the improved LAMP Constructs also can include stabilizers and preservatives. For examples of carriers, stabilizers and adjuvants, see Martin Remington's Pharm. Sci., 15th Ed. (Mack Publ. Co., Easton (1975)).

[0101] A cell has been “transformed”, “transduced”, or “transfected” by the improved LAMP Constructs when such nucleic acids have been introduced inside the cell. Transforming DNA may or may not be integrated (covalently linked) with chromosomal DNA making up the genome of the cell. In prokaryotes, yeast, and mammalian cells for example, the improved LAMP Constructs may be maintained on an episomal element, such as a plasmid. In a eukaryotic cell, a stably transformed cell is one in which the improved LAMP Constructs have become integrated into a chromosome so that it is inherited by daughter cells through chromosome replication. This stability is demonstrated by the ability of the eukaryotic cell to establish cell lines or clones comprised of a population of daughter cells containing the improved LAMP Constructs. A “clone” is a population of cells derived from a single cell or common ancestor by mitosis. A “cell line” is a clone of a primary cell that is capable of stable growth in vitro for many generations (e.g., at least about 10).

[0102] As used herein, an “effective amount” is an amount sufficient to affect beneficial or desired results, e.g., such as an effective amount of the improved LAMP Construct transfer and/or expression, and/or the attainment of a desired therapeutic endpoint. An effective amount can be administered in one or more administrations, applications or dosages. In one aspect, an effective amount of an improved LAMP Construct is an amount sufficient to transform/transduce/transfect at least one cell in a population of cells comprising at least two cells.

[0103] As used herein, a “therapeutically effective amount” is used herein to mean an amount sufficient to prevent, correct and/or normalize an abnormal physiological response. In one aspect, a “therapeutically effective amount” is an amount sufficient to reduce by at least about 30 percent, more preferably by at least 50 percent, most preferably by at least 90 percent, a clinically significant feature of pathology, such as for example, size of a tumor mass, antibody production, cytokine production, fever or white cell count, etc.

[0104] An “antibody” is any immunoglobulin, including antibodies and fragments thereof, that binds a specific antigen. The term encompasses polyclonal, monoclonal, and chimeric antibodies (e.g., bispecific antibodies). An “antibody combining site” is that structural portion of an antibody molecule comprised of heavy and light chain variable and hypervariable regions that specifically binds antigen. Exemplary antibody molecules are intact immunoglobulin molecules, substantially intact immunoglobulin molecules, and those portions of an immunoglobulin molecule that contains the paratope, including Fab, Fab′, F(ab′)₂ and F(v) portions, which portions are preferred for use in the therapeutic methods described herein. Thus, the term antibody encompasses not only whole antibody molecules, but also antibody fragments as well as variants (including derivatives such as fusion proteins) of antibodies and antibody fragments. Examples of molecules which are described by the term “antibody” in this application include, but are not limited to: single chain Fvs (scFvs), Fab fragments, Fab′ fragments, F(ab')₂, disulfide linked Fvs (sdFvs), Fvs, and fragments comprising or alternatively consisting of, either a VL or a VH domain. The term “single chain Fv” or “scFv” as used herein refers to a polypeptide comprising a VL domain of an antibody linked to a VH domain of an antibody. See Carter (2006) Nature Rev. Immunol. 6:243.

[0105] Additionally, antibodies of the invention include, but are not limited to, monoclonal, multi-specific, bi-specific, human, humanized, mouse, or chimeric antibodies, single chain antibodies, camelid antibodies, Fab fragments, F(ab') fragments, anti-idiotypic (anti-Id) antibodies (including, e.g., anti-Id antibodies to antibodies of the invention), domain antibodies and epitope-binding fragments of any of the above. The immunoglobulin molecules of the invention can be of any type (e.g., IgG, IgE, IgM, IgD, IgA and IgY), class (e.g., IgG1, IgG2, IgG3, IgG4, IgA1 and IgA2) or subclass of immunoglobulin molecule.

[0106] Most preferably, the antibodies are human antibodies. As used herein, “human” antibodies include antibodies having the amino acid sequence of a human immunoglobulin and include antibodies isolated from human immunoglobulin libraries and xenomice or other organisms that have been genetically engineered to produce human antibodies. The improved LAMP Constructs described herein can be used in combination with known techniques for generating human antibodies and human monoclonal antibodies as described in the exemplified protocols, see, e.g., PCT publications WO 98/24893; WO 92/01047; WO 96/34096; WO 96/33735; European Patent No. 0598877; U.S. Pat. Nos. 5,413,923; 5,625,126; 5,633,425; 5,569,825; 5,661,016; 5,545,806; 5,814,318; 5,885,793; 5,916,771; and 5,939,598; and Lonberg and Huszar, Int. Rev. Immunol. 13:65-93 (1995).

[0107] Human antibodies or “humanized” chimeric monoclonal antibodies can be produced using the improved LAMP Constructs in combination with techniques described herein or otherwise known in the art. For example, standard methods for producing chimeric antibodies are known in the art. See, for review the following references: Morrison, Science 229:1202 (1985); Oi et al., BioTechniques 4:214 (1986); Cabilly et al., U.S. Pat. No. 4,816,567; Taniguchi et al., EP 171496; Morrison et al., EP 173494; Neuberger et al., WO 8601533; Robinson et al., WO 8702671; Boulianne et al., Nature 312:643 (1984); Neuberger et al., Nature 314:268 (1985).

[0108] The antibodies of the present invention may be monovalent, bivalent, trivalent or multivalent. For example, monovalent scFvs can be multimerized either chemically or by association with another protein or substance. A scFv that is fused to a hexahistidine tag or a Flag tag can be multimerized using Ni-NTA agarose (Qiagen) or using anti-Flag antibodies (Stratagene, Inc.). Additionally, the improved LAMP Constructs can be used to generate monospecific, bispecific, trispecific or of greater multispecificity for the encoded allergen(s) contained in the improved LAMP Construct. See, e.g., PCT publications WO 93/17715; WO 92/08802; WO 91/00360; WO 92/05793; Tutt, et al., J. Immunol. 147:60-69 (1991); U.S. Pat. Nos. 4,474,893; 4,714,681; 4,925,648; 5,573,920; 5,601,819; Kostelny et.al., J. Immunol. 148:1547-1553 (1992).

[0109] An “epitope” is a structure, usually made up of a short peptide sequence or oligosaccharide, that is specifically recognized or specifically bound by a component of the immune system. T-cell epitopes have generally been shown to be linear oligopeptides. Two epitopes correspond to each other if they can be specifically bound by the same antibody. Two epitopes correspond to each other if both are capable of binding to the same B cell receptor or to the same T cell receptor, and binding of one antibody to its epitope substantially prevents binding by the other epitope (e.g., less than about 30%, preferably, less than about 20%, and more preferably, less than about 10%, 5%, 1%, or about 0.1% of the other epitope binds). In the present invention, multiple epitopes can make up an Allergen X (SEQ ID NO:Y).

[0110] The term “allergen” or “allergen of interest” as used herein covers any polypeptide sequence encoded by a polynucleotide sequence cloned into the improved LAMP Construct which is used to elicit an innate or adaptive immune response as shown in Table1/FIG. 14. An “allergen” encompasses both a single allergen as well as multiple allergen sequences (derived from the same or different proteins) cloned into the improved LAMP Construct.

[0111] The term “antigen presenting cell” as used herein includes any cell which presents on its surface an allergen in association with a major histocompatibility complex molecule, or portion thereof, or, alternatively, one or more non-classical MHC molecules, or a portion thereof. Examples of suitable APCs are discussed in detail below and include, but are not limited to, whole cells such as macrophages, dendritic cells, B cells, hybrid APCs, and foster antigen presenting cells.

[0112] As used herein an “engineered antigen-presenting cell” refers to an antigen-presenting cell that has a non-natural molecular moiety on its surface. For example, such a cell may not naturally have a costimulator on its surface or may have an additional artificial costimulator in addition to a natural costimulator on its surface, or may express a non-natural class II molecule on its surface. In preferred embodiments, the engineered antigen-presenting cell has the allergen expressed from the improved LAMP Construct on its surface.

[0113] As used herein, “immune effector cells” refers to cells capable of binding an allergen and which mediate an immune response. These cells include, but are not limited to, T cells, B cells, monocytes, macrophages, NK cells and cytotoxic T lymphocytes (CTLs), for example CTL lines, CTL clones, and CTLs from tumor, inflammatory, or other infiltrates.

[0114] A “vector” includes plasmids and viruses and any DNA or RNA molecule, whether self-replicating or not, which can be used to transform or transfect a cell.

[0115] An “isolated” or “purified” population of cells is substantially free of cells and materials with which it is associated in nature. By substantially free or substantially purified APCs it is meant at least 50% of the population are APCs, preferably at least 70%, more preferably at least 80%, and even more preferably at least 90%, are free of non-APCs cells with which they are associated in nature.

[0116] As used herein, a “genetic modification” refers to any addition, deletion or disruption to a cell's normal nucleotides. Any method which can achieve the genetic modification of APCs are within the spirit and scope of this invention. Art recognized methods include viral mediated gene transfer, liposome mediated transfer, transformation, transfection and transduction, e.g., viral-mediated gene transfer such as the use of the improved LAMP Constructs based on DNA viruses such as adenovirus, adeno-associated virus and herpes virus, as well as retroviral based vectors.

[0117] The practice of the present invention employs, unless otherwise indicated, conventional molecular biology, microbiology, and recombinant DNA techniques within the skill of the art. Such techniques are explained fully in the literature. See, e.g., Maniatis, Fritsch & Sambrook, In Molecular Cloning: A Laboratory Manual (1982); DNA Cloning: A Practical Approach, Volumes I and II (D. N. Glover, ed., 1985); Oligonucleotide Synthesis (M. J. Gait, ed., 1984); Nucleic Acid Hybridization (B. D. Hames & S. J. Higgins, eds., 1985); Transcription and Translation (B. D. Hames & S. I. Higgins, eds., 1984); Animal Cell Culture (R. I. Freshney, ed., 1986); Immobilized Cells and Enzymes (IRL Press, 1986); B. Perbal, A Practical Guide to Molecular Cloning (1984).

[0118] Unless defined otherwise, all technical and scientific terms used herein have the same meaning as commonly understood by one of ordinary skill in the art to which this invention belongs. All publications mentioned herein are incorporated by reference for the purpose of describing and disclosing devices, formulations and methodologies that may be used in connection with the presently described invention

### LAMP Constructs

[0119] LAMP-1, as deduced from a cDNA clone (Chen, et al., J. Biol. Chem. 263: 8754, 1988) consists of a polypeptide core of about 382 amino acids with a large (346-residue) lumenal amino-terminal domain followed by a 24-residue hydrophobic transmembrane region and short (12-residue) carboxyl-terminal cytoplasmic tail. See, FIGS. 2A and 2B. The lumenal domain is highly glycosylated, being substituted with about 20 asparagine linked complex-type oligosaccharides and consists of two approximately 160-residue “homology domains” that are separated by a proline/serine-rich hinge region. Each of these “homology domains” contains 4 uniformly spaced cysteine residues, disulfide bonded to form four 36-38-residue loops symmetrically placed within the two halves of the lumenal domain (Arterbum, et al., J. Biol. Chem. 265: 7419, 1990; see, also Chen, et al., J. Biol. Chem. 25: 263(18): 8754-8, 1988). FIG. 2A schematically shows the conserved domains between LAMP-1, LAMP-2, LAMP-3, Endolyn, LIMBIC, LAMPS, or Macrosailin.

[0120] Previously reported LAMP constructs comprise the following elements in this specific arrangement: (a) a full lumenal domain of LAMP-1 protein, the antigen and then the full transmembrane/cytoplasmic tail of LAMP-1 protein; or (b) the antigen and the full transmembrane/cytoplasmic tail of a LAMP-I protein. In example (a), the antigenic sequence is inserted in between the full lumenal domain of a LAMP-1 protein and the LAMP-1 full transmembrane domain/cytoplasmic tail. Both constructs have been shown to successfully target an antigenic sequence to the lysosome/endosome and will be referred to as “complete LAMP Constructs” as shown in FIG. 1 as compared to the improved LAMP Constructs ILC1-ILC6 described herein. The improved LAMP Constructs described herein do not include the complete LAMP Constructs described in the prior art.

[0121] Although it has been widely reported in the literature that fragments smaller than the full lumenal domain of LAMP-1 were not effective in generating a robust immune response (see, e.g. Godinho et al.). In contrast, the inventors unexpectedly discovered that specific fragments, in certain arrangements, did in fact effectively present allergens to the immune system, generating in many cases a more robust immune response, including the generation of a different repertoire of antibodies. For example, the inventors have identified that the minimal LAMP lumenal domain fragment that is effective for generating a robust immune response is not the full lumenal domain (as widely reported in the literature) but rather a single Homology Domain of the Lumenal Domain of a LAMP Protein.

[0122] For example, constructs can comprise, not the full lumenal domain, but instead a single Homology Domain of the Lumenal Domain of a LAMP Protein. As used herein, the “Homology Domain” comprises at least the 4 uniformly spaced cysteine residues shown in FIGS. 3-10. These cysteine resides are labeled 1, 2, 3, and 4 (and in LIMP-2 and Macrosailin—five cysteines are identified, LIMBIC—six cysteines are identified and Endolyn—eight cysteines are identified) in each Homology Domain as shown in FIGS. 3-10 and are defined herein as the “Cysteine Conserved Fragment.” Additional amino acids can be included to either the N-terminus end and/or the C-terminus end of the Cysteine Conserved Fragment to generate, up to and including a full Homology Domain of a LAMP protein. These additional added amino acids can be derived from the Homology Domain from which the Cysteine Conserved Fragment is derived or from other LAMP Protein Homology Domains. Thus, as used herein, a LAMP Homology Domain comprises and/or consists of one Cysteine Conserved Fragment. At least two LAMP Homology Domains make up the Lumenal Domain of LAMP-1, LAMP-2, LAMP-3, or Endolyn.

[0123] Specifically, in one preferred embodiment, the improved LAMP Construct comprises at least one allergen described in Table 1/FIG. 14 and/or the combinations described in paragraph [0136-0137] and Table 2 fused to the N-terminus of the lumenal domain of a LAMP protein, at least one homology domain of a LAMP protein, or at least one Cysteine Conserved Fragment of a LAMP protein. See, for example ILC-2 and ILC-6 of FIG. 1. In preferred embodiments, these constructs also comprise a transmembrane domain of a LAMP protein, and/or the cytoplasmic tail of a LAMP protein. In other preferred embodiments, when an Allergen X (SEQ ID NO:Y) contains a transmembrane domain, the transmembrane domain of a LAMP protein and/or the cytoplasmic tail of a LAMP protein is unnecessary. In preferred embodiments, two homology domains are included in the improved LAMP Construct (e.g., ILC-1 of FIG. 1). In further preferred embodiments, the two homology domains are derived from a LAMP-1, LAMP-2, LAMP-3, or an Endolyn protein. Alternatively, the two homology domains are derived from different LAMP proteins. In these constructs comprising two homology domains, a LAMP hinge domain may also be included. The improved LAMP Constructs described in this paragraph are unexpected in view of the prior art as the antigen has always been placed in between the full lumenal LAMP-1 domain and the full LAMP-1 transmembrane/cytoplasmic tail, as fragments of the lumenal domain have not been reported to be effective in generating a robust immune response.

[0124] In another preferred embodiment, the improved LAMP Construct comprises at least one allergen described in Table 1/FIG. 14 and/or the combinations described in paragraph [0136-0137] and Table 2 fused to the C-terminus of a single homology domain of a LAMP protein or a single Cysteine Conserved Fragment of a LAMP protein (e.g., ILC-5 of FIG. 1). In preferred embodiments, these constructs also comprise a transmembrane domain of a LAMP protein, and/or the cytoplasmic tail of a LAMP protein (e.g., ILC-3 of FIG. 1) In other preferred embodiments, when an Allergen X (SEQ ID NO:Y) contains a transmembrane domain, the transmembrane domain of a LAMP protein and/or the cytoplasmic tail of a LAMP protein is unnecessary. Alternatively, two homology domains from two different LAMP proteins may be used. The improved LAMP Constructs described in this paragraph are unexpected in view of the prior art as the allergen has always been placed in between the full lumenal LAMP-1 domain and the full LAMP-1 transmembrane/cytoplasmic tail, as fragments of the lumenal domain have not been reported to be effective in generating a robust immune response.

[0125] Thus, the improved LAMP Construct comprises at least one allergen described in Table 1/FIG. 14 and/or the combinations described in paragraph [0136-0137] and Table 2 fused to the C-terminus of a single homology domain of a LAMP protein or a single Cysteine Conserved Fragment of a LAMP protein. See, for example, ILC-3 and ILC-5 of FIG. 1. In preferred embodiments, these constructs also comprise a transmembrane domain of a LAMP protein, and/or the cytoplasmic tail of a LAMP protein. In other preferred embodiments, when an Allergen X (SEQ ID NO:Y) contains a transmembrane domain, the transmembrane domain of a LAMP protein and/or the cytoplasmic tail of a LAMP protein is unnecessary. The improved LAMP Constructs described in this paragraph are unexpected in view of the prior art as described above.

[0126] In another preferred embodiment, the improved LAMP Construct comprises at least one allergen of interest fused in between a first homology domain of a LAMP protein and a second homology domain of a LAMP protein (or at least between two Cysteine Conserved Fragments). See, for example, ILC-4 of FIG. 1. In preferred embodiments, the two homology domains are derived from LAMP-1, LAMP-2, LAMP-3, or an Endolyn protein. In these constructs, the allergen may be placed in the LAMP hinge region. Alternatively, two homology domains from two different LAMP proteins may be used. This arrangement of at least one allergen described in Table 1/FIG. 14 and/or the combinations described in paragraph [0136-0137] and Table 2 fused in between two LAMP homology domains (including Cysteine Conserved Fragments) is unexpected in view of the prior art as described above.

[0127] Each of the improved LAMP Constructs defined above can be generated using the domains defined in the Figures. For example, it is specifically contemplated that the domains included in the improved LAMP Construct illustrated in FIG. 1, for example, can originate from sequences derived from orthologous sequences. See, FIGS. 3-10 for example. It is expressly contemplated that the equivalent domains defined in FIGS. 2A and 2B be used to generate the improved LAMP Constructs illustrated in FIG. 1 for orthologous sequences. Moreover, the orthologous sequences shown in FIGS. 3-10 are representative of the sequences that can be used to generate the domains. It is well within the skill in the art to identify other orthologous sequences and/or isotypes and comparing them to the alignments shown in FIGS. 3-10. Thus, by identifying the equivalent boundaries defined in FIG. 2A and 2B for a human LAMP protein with the alignments shown in FIGS. 3-10, one can generate the improved LAMP Constructs illustrated in FIG. 1.

[0128] As would be well understood by the skilled artisan, the boundaries of each domain are an approximation and may be adjusted at least 1, 2, 3, 4, 5, 6, 7, 8, 9, or 10 amino acids based on cloning considerations and restriction enzyme placement. Therefore, when a particular domain (e.g., a LAMP Homology Domain) is included in the improved LAMP Construct, the amino acids beginning and ending of the domain may be adjust by at least 1, 2, 3, 4, 5, 6, 7, 8, 9, or 10 amino acids as those boundaries defined in FIG. 2A.

[0129] Each of the improved LAMP Constructs described above can additionally comprise a signal sequence and/or additional amino acids in between each domain for cloning purposes as is well known in the art. Additionally, the LAMP homologous domains, the LAMP lumenal domain, the LAMP transmembrane domain, and/or the LAMP cytoplasmic tail domain can originate from the same LAMP protein (e.g., human LAMP-1) or different LAMP proteins (e.g., lumenal domain from human LAMP-1 and transmembrane domain from human LAMP-2, and/or mixing of orthologous domains in the same gene family (e.g., LAMP-1) or different gene family (LAMP-1 and LAMP-2).

[0130] Polypeptide variants of the described LAMP Constructs are contemplated. For example, polypeptides at least about 60%, at least about 70%, at least about 75%, at least about 80%, at least about 85%, at least about 90%, at least about 95%, 96%, 97%, 98% or 99% identity to any of the improved LAMP Constructs described herein as well as polynucleotides encoding these variants. Variants of the improved LAMP Constructs retain the ability to function by targeting the allergenic sequence to the lysosome. For example, a modified lumenal sequence must retain the ability to traffic both membrane and non-membrane antigenic materials to an endosomal compartment with at least about 50%, at least about 60%, at least 70%, at least about 80%, at least about 90%, or at least about 100% efficacy compared to the original domain sequence, i.e., an efficacy that results in sufficient antigen presentation by a cell comprising the chimeric sequence for it to mount an immune response. In one aspect, sequences containing a suitable trafficking signal may be identified by constructing an improved LAMP Construct containing the well-characterized antigenic domain of ovalbumin, a transmembrane domain, and the cytoplasmic domain of a protein containing a putative lysosomal/endosomal targeting signal. Efficiency of targeting can be measured by determining the ability of antigen presenting cells, expressing the improved LAMP Construct, to stimulate HA epitope-specific, MHC class II restricted T-cells (see, e.g., Example 5 of U.S. Pat. No. 5,633,234).

[0131] Polynucleotides encoding any of the described improved LAMP Constructs are preferred embodiments of the invention, along with polynucleotides at least about 60%, at least about 70%, at least about 75%, at least about 80%, at least about 85%, at least about 90%, at least about 95%, 96%, 97%, 98% or 99% identity to any of the improved LAMP Construct polynucleotides described herein. Variants of the improved LAMP Constructs retain the ability to function by targeting the allergenic sequence to the lysosome. For example, a modified lumenal sequence must retain the ability to traffic both membrane and non-membrane antigenic materials to an endosomal compartment with at least about 50%, at least about 60%, at least 70%, at least about 80%, at least about 90%, or at least about 100% efficacy compared to the original domain sequence, i.e., an efficacy that results in sufficient antigen presentation by a cell comprising the chimeric sequence for it to mount an immune response. In one aspect, sequences containing a suitable trafficking signal may be identified by constructing an improved LAMP Construct containing the well-characterized antigenic domain of ovalbumin, a transmembrane domain, and the cytoplasmic domain of a protein containing a putative lysosomal/endosomal targeting signal. Efficiency of targeting can be measured by determining the ability of antigen presenting cells, expressing the improved LAMP Construct, to stimulate HA epitope-specific, MHC class II restricted T-cells (see, e.g., Example 5 of U.S. Pat. No. 5,633,234).

### Allergens

[0132] The following allergens shown in Table 1/FIG. 14 (e.g., Allergen X) can be cloned into each of the LAMP Constructs described herein using techniques well known to the skilled artisan. Moreover, it is specifically contemplated that any one of the Allergen X (SEQ ID NO:Y) listed in Table 1/FIG. 14 can be combined with any other antigen listed in Table 1/FIG. 14 and inserted into the improved LAMP Constructs as described herein, and specifically as disclosed in Table 2.

[0133] As used herein, the term “Allergen X” refers to the specific genes/proteins listed in the following Table 1/FIG. 14, fragments thereof (such as fragments of SEQ ID NO:Y (e.g., as described in column 4 of Table 1) wherein the signal sequence is removed (e.g., as described in column 3 of Table 1)), or mixtures of the listed proteins that are known to induce allergies, i.e., IgE mediated reactions upon their repeated exposure to an individual. Generally, an allergen is any compound, substance, or material that is capable of evoking an allergic reaction. Allergens are usually understood as a subcategory of antigens, which are compounds, substances, or materials capable of evoking an immune response. For carrying out the invention, Allergen X may be selected, among other things, from natural or native allergens, modified natural allergens, synthetic allergens, recombinant allergens, allergoids, and mixtures or combinations thereof. Of particular interest is Allergen X that is capable of causing an IgE-mediated immediate type hypersensitivity.

[0134] As used herein, the amino acid sequence of Allergen X comprises any one of SEQ ID NO:Y (with or without the signal sequence). Representative examples of polynucleotides that can encode Allergen X (SEQ ID NO:Y) are shown as SEQ ID NO:Z in Table 1/FIG. 14 or any polynucleotide (such as a codon optimized sequence) that encodes the Allergen X as described in column 2 or the fragments described in column 4 of Table 1. These polynucleotides are inserted into any one of the Constructs ILC1-6 as shown in FIG. 1 (with or without the signal sequence of SEQ ID NO:Y). Insertion may be facilitated by the use of cloning sequences that flank the amino acid sequence of SEQ ID NO:Y, such as, for example, polynucleotides that encode “Leu-Glu” and “Glu-Phe” (e.g., “CTCGAG” and “GAATTC.”) As used herein, “Allergen X” also encompasses variants (including fragments) of Allergen X. For example, preferred embodiments include Allergen X polypeptide variants that have at least about 60%, at least about 70%, at least about 75%, at least about 80%, at least about 85%, at least about 90%, at least about 95%, 96%, 97%, 98% or 99% identity to SEQ ID NO: Y (as described in column 2 or column 4 of Table 1). These variants retain either (a) the ability to raise an antibody that cross-reacts with the Allergen X from which it was derived and/or (b) Allergen X biological activity. Polynucleotides that encode these variant Allergen X polypeptides are specifically contemplated.

[0135] The invention further provides a nucleic acid molecule encoding any of the Allergen X of Table 1/FIG. 14. The invention also provides a vector comprising the nucleic acid encoding Allergen X (SEQ ID NO:Y), such as, for example, SEQ ID NO:Z or any polynucleotide (such as a codon optimized sequence) that encodes the Allergen X as described in column 2 or the fragments described in column 4 of Table 1, wherein the nucleic acid molecule is operably linked to an expression control sequence in any one of ILC1-6. In one preferred aspect, the vector is a vaccine vector, suitable for vaccinating a patient against Allergen X. In another aspect, the invention provides a delivery vehicle comprising the nucleic acid molecule for facilitating the introduction of the nucleic acid molecule into a cell. The delivery vehicle may be lipid-based (e.g., a liposome formulation), viral-based (e.g., comprising viral proteins encapsulating the nucleic acid molecule), or cell-based. In one preferred aspect, the vector is a vaccine vector. As would be well understood by the skilled artisan, columns 1 and 4 of Table 1 defines the preferred amino acids to be cloned into the improved LAMP Constructs described herein. However, both the N-terminal and the C-terminal boundaries of the fragments described in columns 1 and 4 of Table 1 are an approximation and may be adjusted at least by 1, 2, 3, 4, 5, 6, 7, 8, 9, or 10 amino acids based on cloning considerations and restriction enzyme placement. Therefore, when Allergen X is included in the improved LAMP Construct, the amino acids beginning and ending of Allergen X may be adjust by at least 1, 2, 3, 4, 5, 6, 7, 8, 9, or 10 amino acids as defined in columns 1 and 4 of Table 1.

| | | | | Representative |
|---|---|---|---|---|
| | | Amino Acids of | Preferred Amino Acids | Polynucleotide |
| | Amino Acid Sequence | SEQ ID NO: Y | of SEQ ID NO: Y to be | Sequences Encoding |
| | of Allergen X | relating to Signal | included in improved | SEQ ID NO: Y |
| Allergen X | (SEQ ID NO: Y) | Sequence | LAMP Constructs | (SEQ ID NO: Z) |
| Cor a 1 | SEQ ID NO: 115 | | SEQ ID NO: 115 | SEQ ID NO: 114 |
| Cor a 9 | SEQ ID NO: 117 | | SEQ ID NO: 117 | SEQ ID NO: 116 |
| Cor a 1 - Gly4 - Cor a 9 | SEQ ID NO: 119 | | SEQ ID NO: 119 | SEQ ID NO: 118 |
| Pru du 6 | SEQ ID NO: 121 | | SEQ ID NO: 121 | SEQ ID NO: 120 |
| Ana o 1 | SEQ ID NO: 123 | | SEQ ID NO: 123 | SEQ ID NO: 122 |
| Ana o 2 | SEQ ID NO: 125 | | SEQ ID NO: 125 | SEQ ID NO: 124 |
| Ana o 3 | SEQ ID NO: 127 | | SEQ ID NO: 127 | SEQ ID NO: 126 |
| Ana 0 2 -Gly4- Ana 0 1 - Gly4- Ana 0 3 | SEQ ID NO: 129 | | SEQ ID NO: 129 | SEQ ID NO: 128 |
| Jug n 1 | SEQ ID NO: 131 | | SEQ ID NO: 131 | SEQ ID NO: 130 |
| Jug r 2 | SEQ ID NO: 133 | | SEQ ID NO: 133 | SEQ ID NO: 132 |
| Jug n 1 - Gly4 - Jug r 2 | SEQ ID NO: 135 | | SEQ ID NO: 135 | SEQ ID NO: 134 |
| Amb a 1 | SEQ ID NO: 137 | | SEQ ID NO: 137 | |
| Bet v 1-A | SEQ ID NO: 141 | | SEQ ID NO: 141 | |
| Can f 1 | SEQ ID NO: 145 | | SEQ ID NO: 145 | |
| Cyn d 1 | SEQ ID NO: 149 | | SEQ ID NO: 149 | |
| Der F 1 (19-321) | SEQ ID NO: 153 | | SEQ ID NO: 153 | |
| Der F 1 (99-321) | SEQ ID NO: 157 | | SEQ ID NO: 157 | |
| Der P2 | SEQ ID NO: 161 | | SEQ ID NO: 161 | |
| Der F 2 | SEQ ID NO: 165 | | SEQ ID NO: 165 | |
| DerP1 (del) | SEQ ID NO: 169 | | SEQ ID NO: 169 | |
| Fel D 1 | SEQ ID NO: 173 | | SEQ ID NO: 173 | |
| | SEQ ID NO: 174 | | SEQ ID NO: 174 | |
| Fel d 2 | SEQ ID NO: 178 | | SEQ ID NO: 178 | |
| Fel d 4 | SEQ ID NO: 182 | | SEQ ID NO: 182 | |
| Lit v 1 | SEQ ID NO: 186 | | SEQ ID NO: 186 | |
| Lol p 5a | SEQ ID NO: 190 | | SEQ ID NO: 190 | |
| Phlp 1 | SEQ ID NO: 194 | | SEQ ID NO: 194 | |
| Phl p 5 | SEQ ID NO: 198 | | SEQ ID NO: 198 | |
| Der f 15 | SEQ ID NO: 201 | | SEQ ID NO: 201 | |
| Der f 18 | SEQ ID NO: 202 | | SEQ ID NO: 202 | |
| Zen-1 | SEQ ID NO: 203 | | SEQ ID NO: 203 | |
| Cte f 1 | SEQ ID NO: 204 | | SEQ ID NO: 204 | |
| Der F15-Der F18 | SEQ ID NO: 205 | | SEQ ID NO: 205 | |
| Der F1-Der F2 | SEQ ID NO: 206 | | SEQ ID NO: 206 | |
| Api m1 | SEQ ID NO: 207 | | SEQ ID NO: 207 | |
| Api m2 | SEQ ID NO: 208 | | SEQ ID NO: 208 | |
| Api m3 | SEQ ID NO: 209 | | SEQ ID NO: 209 | |
| Api m5 | SEQ ID NO: 210 | | SEQ ID NO: 210 | |
| Api m10 | SEQ ID NO: 211 | | SEQ ID NO: 211 | |
| Ves v1 | SEQ ID NO: 212 | | SEQ ID NO: 212 | |
| Ves v2 | SEQ ID NO: 213 | | SEQ ID NO: 213 | |
| Ves v3 | SEQ ID NO: 214 | | SEQ ID NO: 214 | |
| Ves v5 | SEQ ID NO: 215 | | SEQ ID NO: 215 | |
| Pol d1 | SEQ ID NO: 216 | | SEQ ID NO: 216 | |
| Pol d5 | SEQ ID NO: 217 | | SEQ ID NO: 217 | |
| Ara H1 | SEQ ID NO: 218 | 1-25 | 26-626 | |
| Ara H2 | SEQ ID NO: 219 | | SEQ ID NO: 219 | |
| Ara H3 | SEQ ID NO: 220 | 1-20 | 21-512 | |
| AraH1-AraH2-AraH3 | SEQ ID NO: 221 | | SEQ ID NO: 221 | |
| Cry J1 (C. japonica) | SEQ ID NO: 222 | 1-21 | 22-374 | |
| Cry J2 (C. japonica) | SEQ ID NO: 223 | 1-22 | 23-514 | |
| CryJ1-Cry J2 (C. japonica) | SEQ ID NO: 224 | | SEQ ID NO: 224 | |
| Cry J3 (Cry 13.8; C. japonica) | SEQ ID NO: 225 | 1-26 | 27-225 | |
| CJP-4 (C. japonica) | SEQ ID NO: 226 | 1-34 | 35-281 | |
| CJP-6 (C. japonica) | SEQ ID NO: 227 | 1-35 | 36-306 | |
| CJP-8 (C. japonica) | SEQ ID NO: 228 | 1-35 | 36-165 | |
| CPA63 (C. japonica) | SEQ ID NO: 229 | 1-20 | 21-472 | |
| CJP38 (C. japonica) | SEQ ID NO: 230 | 1-28 | 29-348 | |
| Cha o 1 (C. obtuse) | SEQ ID NO: 231 | 1-21 | 22-375 | |
| Jun a 1 (J. ashei) | SEQ ID NO: 232 | 1-21 | 22-367 | |
| Jun v 1 (J. virginiana) | SEQ ID NO: 233 | 1-21 | 22-367 | |
| Cup a 1 (H. arizonica) | SEQ ID NO: 234 | 1-21 | 22-367 | |
| Jun o 1 (J. oxycedrus) | SEQ ID NO: 235 | 1-21 | 22-366 | |
| Cup s 1 (C. sempervirens) | SEQ ID NO: 236 | 1-21 | 22-367 | |
| Cha o 2 (C. obtuse)(signal | SEQ ID NO: 237 | 1-50 | 51-514 | |
| sequence is residues 1-22) | | | | |
| Jun a 2 (J. ashei)(signal | SEQ ID NO: 238 | 1-53 | 54-507 | |
| sequence is residues 1-22) | | | | |
| Cup a 2 (H. arizonica) | SEQ ID NO: 239 | | SEQ ID NO: 239 | |
| Jun a 3 (J. ashei)(signal | SEQ ID NO: 240 | 1-26 | 27-225 | |
| sequence is residues 1-26) | | | | |
| Jun r 3 (J. rigida) | SEQ ID NO: 241 | 1-26 | 27-225 | |
| Cup s 3 (C. sempervirens) | SEQ ID NO: 242 | 1-26 | 27-224 | |
| Cup a 3 (H. arizonica) | SEQ ID NO: 243 | | SEQ ID NO: 243 | |
| Ch4A (P. monticola) | SEQ ID NO: 244 | 1-25 | 26-274 | |
| Ch4-1 (P. menziesii; SEQ ID N0: 30) | SEQ ID NO: 245 | 1-26 | 27-277 | |
| PT-1 (P. taeda) | SEQ ID NO: 246 | | SEQ ID NO: 246 | |
| LTP (P. abies) | SEQ ID NO: 247 | 1-25 | 26-173 | |
| Ara H 6 | SEQ ID NO: 248 | | SEQ ID NO: 248 | |
| Ara H 8 | SEQ ID NO: 249 | | SEQ ID NO: 249 | |
| Ara H 9 | SEQ ID NO: 250 | | SEQ ID NO: 250 | |

[0136] Additionally, more than one Allergen X can be combined (in any order) and administered as a vaccine as in any one of the improved LAMP Constructs as described herein. It is specifically envisioned that the combinations of Allergen X can be cloned within a single improved LAMP construct, or can be delivered in a composition comprising multiple improved LAMP constructs of Allergen X. Specifically, Allergen X as described in Table 1/FIG. 14 can be cloned into the improved LAMP Constructs described herein either individually, or in combination with one another Allergen X as described in Table 2. The order of the combination of Allergen X as described in Table 2 for a particular improved LAMP construct can vary as this list describes what an improved LAMP Construct comprises and not necessarily to describe the arrangement of the Allergen X within a particular construct.

[0137] In preferred embodiments, the improved LAMP Constructs described herein comprise, or consist, (a) any one of the polynucleotides of SEQ ID NO:Z as shown in Table 1/FIG. 14; (b) a polynucleotide encoding a polypeptide encoded by any one of the polynucleotides of SEQ ID NO:Z as shown in Table 1/FIG. 14; (c) a polynucleotide that encodes a polypeptide comprising the amino acid sequence as described in either column 2 or column 4 of SEQ ID NO: Y as shown in Table 1/FIG. 14; or (g) polynucleotides with at least about 60%, at least about 70%, at least about 75%, at least about 80%, at least about 85%, at least about 90%, at least about 95%, 96%, 97%, 98% or 99% identity to any one of the polynucleotides of (a)-(c). Polypeptides encoded by these polynucleotides are additional preferred embodiments.

TABLE 2

| Allergen | |
|---|---|
| X | Can be combined with any one or more of the following Allergens: |
| Cor a 1 | Cor a 9, Pru du 6, Ana 0 1, Ana 0 2, Ana 0 3, Jug n 1, Jug r 2, Amb a 1, Bet v 1-A, Can f 1, Cyn d 1, |
| | Der F 1 (19-321), Der F 1 (99-321), Der P2, Der F 2, DerP1 (del), Fel d 1, Fel d 2, Fel d 4, Lit v 1, |
| | Lol p 5a, Phl p 1, Phl p 5, Der f 15, Der f 18, Zen-1, Cte f 1, Api m1, Api m2, Api m3, Api m5, Api m10, |
| | Ves v1, Ves v2, Ves v3, Ves v5, Pol d1, Pol d5, Ara H1, Ara H2, Ara H3, Cry J1, Cry J2, Cry J3, |
| | CJP-4, CJP-6, CJP-8, CPA63, CJP38, Cha o 1, Jun a 1, Jun v 1, Cup a 1, Jun o 1, Cup s 1, Cha o 2, |
| | Jun a 2, Cup a 2, Jun a 3, Jun r 3, Cup s 3, Cup a 3, Ch4A, Ch4-1, PT-1, LTP, Ara H 6, |
| | Ara H 8, and/or Ara H 9 |
| Cor a 9 | Cor a 1, Pru du 6, Ana 0 1, Ana 0 2, Ana 0 3, Jug n 1, Jug r 2, Amb a 1, Bet v 1-A, Can f 1, Cyn d 1, |
| | Der F 1 (19-321), Der F 1 (99-321), Der P2, Der F 2, DerP1 (del), Fel d 1, Fel d 2, Fel d 4, Lit v 1, |
| | Lol p 5a, Phl p 1, Phl p 5, Der f 15, Der f 18, Zen-1, Cte f 1, Api m1, Api m2, Api m3, Api m5, Api m10, |
| | Ves v1, Ves v2, Ves v3, Ves v5, Pol d1, Pol d5, Ara H1, Ara H2, Ara H3, Cry J1, Cry J2, Cry J3, CJP-4, |
| | CJP-6, CJP-8, CPA63, CJP38, Cha o 1, Jun a 1, Jun v 1, Cup a 1, Jun o 1, Cup s 1, Cha o 2, Jun a 2, |
| | Cup a 2, Jun a 3, Jun r 3, Cup s 3, Cup a 3, Ch4A, Ch4-1, PT-1, LTP, Ara H 6, Ara H 8, and/or Ara H 9 |
| Pru du 6 | Cora 1, Cor a 9, Ana 0 1, Ana 0 2, Ana 0 3, Jug n 1, Jug r 2, Amb a 1, Bet v 1-A, Can f 1, Cyn d 1, |
| | Der F 1 (19-321), Der F 1 (99-321), Der P2, Der F 2, DerP1 (del), Fel d 1, Fel d 2, Fel d 4, Lit v 1, |
| | Lol p 5a, Phl p 1, Phl p 5, Der f 15, Der f 18, Zen-1, Cte f 1, Api m1, Api m2, Api m3, Api m5, |
| | Api m10, Ves v1, Ves v2, Ves v3, Ves v5, Pol d1, Pol d5, Ara H1, Ara H2, Ara H3, Cry J1, Cry J2, |
| | Cry J3, CJP-4, CJP-6, CJP-8, CPA63, CJP38, Cha o 1, Jun a 1, Jun v 1, Cup a 1, Jun o 1, Cup s 1, |
| | Cha o 2, Jun a 2, Cup a 2, Jun a 3, Jun r 3, Cup s 3, Cup a 3, Ch4A, Ch4-1, PT-1, LTP, Ara H 6, |
| | Ara H 8, and/or Ara H 9 |
| Ana o 1 | Cora 1, Cor a 9, Pru du 6, Ana 0 2, Ana 0 3, Jug n 1, Jug r 2, Amb a 1, Bet v 1-A, Can f 1, Cyn d 1, |
| | Der F 1 (19-321), Der F 1 (99-321), Der P2, Der F 2, DerP1 (del), Fel d 1, Fel d 2, Fel d 4, Lit v 1, |
| | Lol p 5a, Phl p 1, Phl p 5, Der f 15, Der f 18, Zen-1, Cte f 1, Api m1, Api m2, Api m3, Api m5, Api m10, |
| | Ves v1, Ves v2, Ves v3, Ves v5, Pol d1, Pol d5, Ara H1, Ara H2, Ara H3, Cry J1, Cry J2, Cry J3, CJP-4, |
| | CJP-6, CJP-8, CPA63, CJP38, Cha o 1, Jun a 1, Jun v 1, Cup a 1, Jun o 1, Cup s 1, Cha o 2, Jun a 2, |
| | Cup a 2, Jun a 3, Jun r 3, Cup s 3, Cup a 3, Ch4A, Ch4-1, PT-1, LTP, Ara H 6, Ara H 8, and/or Ara H 9 |
| Ana o 2 | Cor a 1, Cor a 9, Pru du 6, Ana 0 1, Ana 0 3, Jug n 1, Jug r 2, Amb a 1, Bet v 1-A Can f 1, Cyn d 1, |
| | Der F 1 (19-321), Der F 1 (99-321), Der P2, Der F 2, DerP1 (del), Fel d 1, Fel d 2, Fel d 4, |
| | Lit v 1, Lol p 5a, Phl p 1, Phl p 5, Der f 15, Der f 18, Zen-1, Cte f 1, Api m1, Api m2, |
| | Api m3, Api m5, Api m10, Ves v1, Ves v2, Ves v3, Ves v5, Pol d1, Pol d5, Ara H1, Ara H2, Ara |
| | H3, Cry J1, Cry J2, Cry J3, CJP-4, CJP-6, CJP-8, CPA63, CJP38, Cha o 1, Jun a 1, Jun v 1, |
| | Cup a 1, Jun o 1, Cup s 1, Cha o 2, Jun a 2, Cup a 2, Jun a 3, Jun r 3, Cup s 3, Cup a 3, |
| | Ch4A, Ch4-1, PT-1, LTP, Ara H 6, Ara H 8, and/or Ara H 9 |
| Ana o 3 | Cor a 1, Cor a 9, Pru du 6, Ana 0 1, Ana 0 2, Jug n 1, Jug r 2, Amb a 1, Bet v 1-A Can f 1, Cyn d 1, |
| | Der F 1 (19-321), Der F 1 (99-321), Der P2, Der F 2, DerP1 (del), Fel d 1, Fel d 2, Fel d 4, |
| | Lit v 1, Lol p 5a, Phl p 1, Phl p 5, Der f 15, Der f 18, Zen-1, Cte f 1, Api m1, Api m2, Api m3, Api m5, |
| | Api m10, Ves v1, Ves v2, Ves v3, Ves v5, Pol d1, Pol d5, Ara H1, Ara H2, Ara H3, Cry J1, Cry J2, Cry J3, |
| | CJP-4, CJP-6, CJP-8, CPA63, CJP38, Cha o 1, Jun a 1, Jun v 1, Cup a 1, Jun o 1, Cup s 1, Cha o 2, |
| | Jun a 2, Cup a 2, Jun a 3, Jun r 3, Cup s 3, Cup a 3, Ch4A, Ch4-1, PT-1, LTP, Ara H 6, Ara H 8, |
| | and/or Ara H 9 |
| Jug n 1 | Cor a 1, Cor a 9, Pru du 6, Ana 0 1, Ana 0 2, Ana 0 3, Jug r 2, Amb a 1, Bet v 1-A, Can f 1, Cyn d 1, |
| | Der F 1 (19-321), Der F 1 (99-321), Der P2, Der F 2, DerP1 (del), Fel d 1, Fel d 2, Fel d 4, |
| | Lit v 1, Lol p 5a, Phl p 1, Phl p 5, Der f 15, Der f 18, Zen-1, Cte f 1, Api m1, Api m2, |
| | Api m3, Api m5, Api m10, Ves v1, Ves v2, Ves v3, Ves v5, Pol d1, Pol d5, Ara H1, Ara H2, |
| | Ara H3, Cry J1, Cry J2, Cry J3, CJP-4, CJP-6, CJP-8, CPA63, CJP38, Cha o 1, Jun a 1, Jun v 1, |
| | Cup a 1, Jun o 1, Cup s 1, Cha o 2, Jun a 2, Cup a 2, Jun a 3, Jun r 3, Cup s 3, Cup a 3, |
| | Ch4A, Ch4-1, PT-1, LTP, Ara H 6, Ara H 8, and/or Ara H 9 |
| Jug r 2 | Cor a 1, Cor a 9, Pru du 6, Ana 0 1, Ana 0 2, Ana 0 3, Jug n 1, Amb a 1, Bet v 1-A, Can f 1, Cyn d 1, |
| | Der F 1 (19-321), Der F 1 (99-321), Der P2, Der F 2, DerP1 (del), Fel d 1, Fel d 2, Fel d 4, |
| | Lit v 1, Lol p 5a, Phl p 1, Phl p 5, Der f 15, Der f 18, Zen-1, Cte f 1, Api m1, Api m2, Api m3, |
| | Api m5, Api m10, Ves v1, Ves v2, Ves v3, Ves v5, Pol d1, Pol d5, Ara H1, Ara H2, Ara H3, Cry J1, |
| | Cry J2, Cry J3, CJP-4, CJP-6, CJP-8, CPA63, CJP38, Cha o 1, Jun a 1, Jun v 1, Cup a 1, Jun o 1, |
| | Cup s 1, Cha o 2, Jun a 2, Cup a 2, Jun a 3, Jun r 3, Cup s 3, Cup a 3, Ch4A, Ch4-1, PT-1, |
| | LTP, Ara H 6, Ara H 8, and/or Ara H 9 |
| Amb a 1 | Cor a 1, Cor a 9, Pru du 6, Ana 0 1, Ana 0 2, Ana 0 3, Jug n 1, Jug r 2, Bet v 1-A, Can f 1, Cyn d 1, |
| | Der F 1 (19-321), Der F 1 (99-321), Der P2, Der F 2, DerP1 (del), Fel d 1, Fel d 2, Fel d 4, |
| | Lit v 1, Lol p 5a, Phl p 1, Phl p 5, Der f 15, Der f 18, Zen-1, Cte f 1, Api m1, Api m2, Api m3, |
| | Api m5, Api m10, Ves v1, Ves v2, Ves v3, Ves v5, Pol d1, Pol d5, Ara H1, Ara H2, Ara H3, Cry J1, |
| | Cry J2, Cry J3, CJP-4, CJP-6, CJP-8, CPA63, CJP38, Cha o 1, Jun a 1, Jun v 1, Cup a 1, Jun o 1, |
| | Cup s 1, Cha o 2, Jun a 2, Cup a 2, Jun a 3, Jun r 3, Cup s 3, Cup a 3, Ch4A, Ch4-1, PT-1, LTP, |
| | Ara H 6, Ara H 8, and/or Ara H 9 |
| Bet v 1-A | Cor a 1, Cor a 9, Pru du 6, Ana 0 1, Ana 0 2, Ana 0 3, Jug n 1, Jug r 2, Amb a 1, Can f 1, Cyn d 1, |
| | Der F 1 (19-321), Der F 1 (99-321), Der P2, Der F 2, DerP1 (del), Fel d 1, Fel d 2, Fel d 4, |
| | Lit v 1, Lol p 5a, Phl p 1, Phl p 5, Der f 15, Der f 18, Zen-1, Cte f 1, Api m1, Api m2, |
| | Api m3, Api m5, Api m10, Ves v1, Ves v2, Ves v3, Ves v5, Pol d1, Pol d5, Ara H1, Ara H2, Ara H3, |
| | Cry J1, Cry J2, Cry J3, CJP-4, CJP-6, CJP-8, CPA63, CJP38, Cha o 1, Jun a 1, Jun v 1, |
| | Cup a 1, Jun o 1, Cup s 1, Chao 2, Jun a 2, Cup a 2, Jun a 3, Jun r 3, Cup s 3, Cup a 3, |
| | Ch4A, Ch4-1, PT-1, LTP, Ara H 6, Ara H 8, and/or Ara H 9 |
| Can f 1 | Cor a 1, Cor a 9, Pru du 6, Ana 0 1, Ana 0 2, Ana 0 3, Jug n 1, Jug r 2, Amb a 1, Bet v 1-A, Cyn d 1, |
| | Der F 1 (19-321), Der F 1 (99-321), Der P2, Der F 2, DerP1 (del), Fel d 1, Fel d 2, Fel d 4, |
| | Lit v 1, Lol p 5a, Phl p 1, Phl p 5, Der f 15, Der f 18, Zen-1, Cte f 1, Api m 1, Api m2, Api m3, |
| | Api m5, Api m10, Ves v1, Ves v2, Ves v3, Ves v5, Pol d1, Pol d5, Ara H1, Ara H2, Ara H3, Cry J1, |
| | Cry J2, Cry J3, CJP-4, CJP-6, CJP-8, CPA63, CJP38, Cha o 1, Jun a 1, Jun v 1, Cup a 1, Jun o 1, |
| | Cup s 1, Cha o 2, Jun a 2, Cup a 2, Jun a 3, Jun r 3, Cup s 3, Cup a 3, Ch4A, Ch4-1, PT-1, |
| | LTP, Ara H 6, Ara H 8, and/or Ara H 9 |
| Cyn d 1 | Cor a 1, Cor a 9, Pru du 6, Ana 0 1, Ana 0 2, Ana 0 3, Jug n 1, Jug r 2, Amb a 1, Bet v 1-A, Can f 1, |
| | Der F 1 (19-321), Der F 1 (99-321), Der P2, Der F 2, DerP1 (del), Fel d 1, Fel d 2, Fel d 4, |
| | Lit v 1, Lol p 5a, Phl p 1, Phl p 5, Der f 15, Der f 18, Zen-1, Cte f 1, Api m1, Api m2, Api m3, |
| | Api m5, Api m10, Ves v1, Ves v2, Ves v3, Ves v5, Pol d1, Pol d5, Ara H1, Ara H2, Ara H3, Cry J1, |
| | Cry J2, Cry J3, CJP-4, CJP-6, CJP-8, CPA63, CJP38, Cha o 1, Jun a 1, Jun v 1, Cup a 1, Jun o 1, |
| | Cup s 1, Cha o 2, Jun a 2, Cup a 2, Jun a 3, Jun r 3, Cup s 3, Cup a 3, |
| | Ch4A, Ch4-1, PT-1, LTP, Ara H 6, Ara H 8, and/or Ara H 9 |
| DerF 1 | Cor a 1, Cor a 9, Pru du 6, Ana 0 1, Ana 0 2, Ana 0 3, Jug n 1, Jug r 2, Amb a 1, Bet v 1-A, Can f 1, |
| (19-321) | Cyn d 1, Der F 1 (99-321), Der P2, Der F 2, DerP1 (del), Fel d 1, Fel d 2, Fel d4, |
| | Lit v 1, Lol p 5a, Phl p 1, Phl p 5, Der f 15, Der f 18, Zen-1, Cte f 1, Api m1, Api m2, Api m3, |
| | Api m5, Api m10, Ves v1, Ves v2, Ves v3, Ves v5, Pol d1, Pol d5, Ara H1, Ara H2, Ara H3, Cry J1, |
| | Cry J2, Cry J3, CJP-4, CJP-6, CJP-8, CPA63, CJP38, Cha o 1, Jun a 1, Jun v 1, Cup a 1, Jun o 1, |
| | Cup s 1, Cha o 2, Jun a 2, Cup a 2, Jun a 3, Jun r 3, Cup s 3, Cup a 3, Ch4A, Ch4-1, |
| | PT-1, LTP, Ara H 6, Ara H 8, and/or Ara H 9 |
| Der F 1 | Cor a 1, Cor a 9, Pru du 6, Ana 0 1, Ana 0 2, Ana 0 3, Jug n 1, Jug r 2, Amb a 1, Bet v 1-A, Can f 1, |
| (99-321) | Cyn d 1, Der F 1 (19-321), Der P2, Der F 2, DerP1 (del), Fel d 1, Fel d 2, Fel d 4, |
| | Lit v 1, Lol p 5a, Phl p 1, Phl p 5, Der f 15, Der f 18, Zen-1, Cte f 1, Api m1, Api m2, |
| | Api m3, Api m5, Api m10, Ves v1, Ves v2, Ves v3, Ves v5, Pol d1, Pol d5, Ara H1, Ara H2, |
| | Ara H3, Cry J1, Cry J2, Cry J3, CJP-4, CJP-6, CJP-8, CPA63, CJP38, Cha o 1, Jun a 1, |
| | Jun v 1, Cup a 1, Jun o 1, Cup s 1, Cha o 2, Jun a 2, Cup a 2, Jun a 3, Jun r 3, |
| | Cup s 3, Cup a 3, Ch4A, Ch4-1, PT-1, LTP, Ara H 6, Ara H 8, and/or Ara H 9 |
| Der P2 | Cor a 1, Cor a 9, Pru du 6, Ana 0 1, Ana 0 2, Ana 0 3, Jug n 1, Jug r 2, Amb a 1, Bet v 1-A, Can f 1, |
| | Cyn d 1, Der F 1 (19-321), Der F 1 (99-321), Der F 2, DerP1 (del), Fel d 1, Fel d 2, Fel d 4, |
| | Lit v 1, Lol p 5a, Phl p 1, Phl p 5, Der f 15, Der f 18, Zen-1, Cte f 1, Api m1, Api m2, Api m3, |
| | Api m5, Api m10, Ves v1, Ves v2, Ves v3, Ves v5, Pol d1, Pol d5, Ara H1, Ara H2, Ara H3, |
| | Cry J1, Cry J2, Cry J3, CJP-4, CJP-6, CJP-8, CPA63, CJP38, Cha o 1, Jun a 1, Jun v 1, Cup a 1, |
| | Jun o 1, Cup s 1, Cha o 2, Jun a 2, Cup a 2, Jun a 3, Jun r 3, Cup s 3, Cup a 3, |
| | Ch4A, Ch4-1, PT-1, LTP, Ara H 6, Ara H 8, and/or Ara H 9 |
| Der F 2 | Cor a 1, Cor a 9, Pru du 6, Ana 0 1, Ana 0 2, Ana 0 3, Jug n 1, Jug r 2, Amb a 1, Bet v 1-A, Can f 1, |
| | Cyn d 1, Der F 1 (19-321), Der F 1 (99-321), Der P2, DerP1 (del), Fel d 1, Fel d 2, Fel d4, |
| | Lit v 1, Lol p 5a, Phl p 1, Phl p 5, Der f 15, Der f 18, Zen-1, Cte f 1, Api m1, Api m2, Api m3, |
| | Api m5, Api m10, Ves v1, Ves v2, Ves v3, Ves v5, Pol d1, Pol d5, Ara H1, Ara H2, Ara H3, Cry J1, |
| | Cry J2, Cry J3, CJP-4, CJP-6, CJP-8, CPA63, CJP38, Cha o 1, Jun a 1, Jun v 1, Cup a 1, Jun o 1, |
| | Cup s 1, Cha o 2, Jun a 2, Cup a 2, Jun a 3, Jun r 3, Cup s 3, Cup a 3, Ch4A, |
| | Ch4-1, PT-1, LTP, Ara H 6, Ara H 8, and/or Ara H 9 |
| DerP1 | Cor a 1, Cor a 9, Pru du 6, Ana 0 1, Ana 0 2, Ana 0 3, Jug n 1, Jug r 2, Amb a 1, Bet v 1-A, Can f 1, |
| (del) | Cyn d 1, Der F 1 (19-321), Der F 1 (99-321), Der P2, Der F 2, Fel d 1, Fel d 2, Fel d 4, |
| | Lit v 1, Lol p 5a, Phl p 1, Phl p 5, Der f 15, Der f 18, Zen-1, Cte f 1, Api m1, Api m2, |
| | Api m3, Api m5, Api m10, Ves v1, Ves v2, Ves v3, Ves v5, Pol d1, Pol d5, Ara H1, Ara H2, |
| | Ara H3, Cry J1, Cry J2, Cry J3, CJP-4, CJP-6, CJP-8, CPA63, CJP38, Cha o 1, Jun a 1, Jun v 1, |
| | Cup a 1, Jun o 1, Cup s 1, Cha o 2, Jun a 2, Cup a 2, Jun a 3, Jun r 3, Cup s 3, Cup a 3, |
| | Ch4A, Ch4-1, PT-1, LTP, Ara H 6, Ara H 8, and/or Ara H 9 |
| Fel D 1 | Cor a 1, Cor a 9, Pru du 6, Ana 0 1, Ana 0 2, Ana 0 3, Jug n 1, Jug r 2, Amb a 1, Bet v 1-A, Can f 1, |
| | Cyn d 1, Der F 1 (19-321), Der F 1 (99-321), Der P2, Der F 2, DerP1 (del), Fel d2, Fel d4, |
| | Lit v 1, Lol p 5a, Phl p 1, Phl p 5, Der f 15, Der f 18, Zen-1, Cte f 1, Api m1, Api m2, |
| | Api m3, Api m5, Api m10, Ves v1, Ves v2, Ves v3, Ves v5, Pol d1, Pol d5, Ara H1, Ara H2, |
| | Ara H3, Cry J1, Cry J2, Cry J3, CJP-4, CJP-6, CJP-8, CPA63, CJP38, Cha o 1, Jun a 1, |
| | Jun v 1, Cup a 1, Jun o 1, Cup s 1, Cha o 2, Jun a 2, Cup a 2, Jun a 3, Jun r 3, |
| | Cup s 3, Cup a 3, Ch4A, Ch4-1, PT-1, LTP, Ara H 6, Ara H 8, and/or Ara H 9 |
| Fel d 2 | Cor a 1, Cor a 9, Pru du 6, Ana 0 1, Ana 0 2, Ana 0 3, Jug n 1, Jug r 2, Amb a 1, Bet v 1-A, Can f 1, |
| | Cyn d 1, Der F 1 (19-321), Der F 1 (99-321), Der P2, Der F 2, DerP1 (del), Fel d 1, Fel d 4, |
| | Lit v 1, Lol p 5a, Phl p 1, Phl p 5, Der f 15, Der f 18, Zen-1, Cte f 1, Api m1, Api m2, Api m3, |
| | Api m5, Api m10, Ves v1, Ves v2, Ves v3, Ves v5, Pol d1, Pol d5, Ara H1, Ara H2, Ara H3, Cry J1, |
| | Cry J2, Cry J3, CJP-4, CJP-6, CJP-8, CPA63, CJP38, Cha o 1, Jun a 1, Jun v 1, Cup a 1, Jun o 1, |
| | Cup s 1, Cha o 2, Jun a 2, Cup a 2, Jun a 3, Jun r 3, Cup s 3, Cup a 3, Ch4A, Ch4-1, PT-1, LTP, |
| | Ara H 6, Ara H 8, and/or Ara H 9 |
| Fel d 4 | Cor a 1, Cor a 9, Pru du 6, Ana 0 1, Ana 0 2, Ana 0 3, Jug n 1, Jug r 2, Amb a 1, Bet v 1-A, Can f 1, |
| | Cyn d 1, Der F 1 (19-321), Der F 1 (99-321), Der P2, DerF 2, DerP1 (del), Fel d 1, Fel d 2, |
| | Litv 1, Lol p 5a, Phl p 1, Phl p 5, Der f 15, Der f 18, Zen-1, Cte f 1, Api m1, Api m2, Api m3, |
| | Api m5, Api m10, Ves v1, Ves v2, Ves v3, Ves v5, Pol d1, Pol d5, Ara H1, Ara H2, Ara H3, Cry J1, |
| | Cry J2, Cry J3, CJP-4, CJP-6, CJP-8, CPA63, CJP38, Cha o 1, Juna 1, Jun v 1, Cup a 1, Jun o 1, |
| | Cup s 1, Cha o 2, Jun a 2, Cup a 2, Jun a 3, Jun r 3, Cup s 3, Cup a 3, Ch4A, |
| | Ch4-1, PT-1, LTP, Ara H 6, Ara H 8, and/or Ara H 9 |
| Lit v 1 | Cor a 1, Cor a 9, Pru du 6, Ana 0 1, Ana 0 2, Ana 0 3, Jug n 1, Jug r 2, Amb a 1, Bet v 1 - A, |
| | Can f 1, Cyn d 1, Der F 1 (19-321), Der F 1 (99-321), Der P2, Der F 2, DerP1 (del), |
| | Fel d 1, Fel d 2, Fel d 4, Lol p 5a, Phl p 1, Phl p 5, Der f 15, Der f 18, Zen-1, Cte f 1, |
| | Api m1, Api m2, Api m3, Api m5, Api m10, Ves v1, Ves v2, Ves v3, Ves v5, Pol d1, Pol d5, Ara H1, |
| | Ara H2, Ara H3, Cry J1, Cry J2, Cry J3, CJP-4, CJP-6, CJP-8, CPA63, CJP38, Cha o 1, Jun a 1, |
| | Jun v 1, Cup a 1, Jun o 1, Cup s 1, Cha o 2, Jun a 2, Cup a 2, Jun a 3, Jun r 3, |
| | Cup s 3, Cup a 3, Ch4A, Ch4-1, PT-1, LTP, Ara H 6, Ara H 8, and/or Ara H 9 |
| Lol p 5a | Cor a 1, Cor a 9, Pru du 6, Ana 0 1, Ana 0 2, Ana 0 3, Jug n 1, Jug r 2, Amb a 1, Bet v 1-A, Can f 1, |
| | Cyn d 1, Der F 1 (19-321), Der F 1 (99-321), Der P2, Der F 2, DerP1 (del), Fel d 1, Fel d 2, Fel d 4, |
| | Lit v 1, Phl p 1, Phl p 5, Der f 15, Der f 18, Zen-1, Cte f 1, Api m1, Api m2, Api m3, |
| | Api m5, Api m10, Ves v1, Ves v2, Ves v3, Ves v5, Pol d1, Pol d5, Ara H1, Ara H2, Ara H3, |
| | Cry J1, Cry J2, Cry J3, CJP-4, CJP-6, CJP-8, CPA63, CJP38, Cha o 1, Jun a 1, Jun v 1, |
| | Cup a 1, Jun o 1, Cup s 1, Cha o 2, Jun a 2, Cup a 2, Jun a 3, Jun r 3, Cup s 3, |
| | Cup a 3, Ch4A, Ch4-1, PT-1, LTP, Ara H 6, Ara H 8, and/or Ara H 9 |
| Phl p 1 | Cor a 1, Cor a 9, Pru du 6, Ana 0 1, Ana 0 2, Ana 0 3, Jug n 1, Jug r 2, Amb a 1, Bet v 1-A, Can f 1, |
| | Cyn d 1, Der F 1 (19-321), Der F 1 (99-321), Der P2, Der F 2, DerP1 (del), Fel d 1, Fel d 2, Fel d 4, |
| | Lit v 1, Lol p 5a, Phl p 5, Der f 15, Der f 18, Zen-1, Cte f 1, Api m1, Api m2, Api m3, |
| | Api m5, Api m10, Ves v1, Ves v2, Ves v3, Ves v5, Pol d1, Pol d5, Ara H1, Ara H2, Ara H3, |
| | Cry J1, Cry J2, Cry J3, CJP-4, CJP-6, CJP-8, CPA63, CJP38, Cha o 1, Jun a 1, Jun v 1, |
| | Cup a 1, Jun o 1, Cup s 1, Cha o 2, Jun a 2, Cup a 2, Jun a 3, Jun r 3, |
| | Cup s 3, Cup a 3, Ch4A, Ch4-1, PT-1, LTP, Ara H 6, Ara H 8, and/or Ara H 9 |
| Phl p 5 | Cor a 1, Cor a 9, Pru du 6, Ana 0 1, Ana 0 2, Ana 0 3, Jug n 1, Jug r 2, Amb a 1, Bet v 1-A, Can f 1, |
| | Cyn d 1, Der F 1 (19-321), Der F 1 (99-321), Der P2, Der F 2, DerP1 (del), Fel d 1, Fel d 2, |
| | Fel d 4, Lit v 1, Lol p 5a, Phl p 1, Der f 15, Der f 18, Zen-1, Cte f 1, Api m1, Api m2, |
| | Api m3, Api m5, Api m10, Ves v1, Ves v2, Ves v3, Ves v5, Pol d1, Pol d5, Ara H1, Ara H2, Ara H3, |
| | Cry J1, Cry J2, Cry J3, CJP-4, CJP-6, CJP-8, CPA63, CJP38, Cha o 1, Jun a 1, Jun v 1, Cup a 1, |
| | Jun o 1, Cup s 1, Cha o 2, Jun a 2, Cup a 2, Jun a 3, Jun r 3, Cup s 3, Cup a 3, Ch4A, |
| | Ch4-1, PT-1, LTP, Ara H 6, Ara H 8, and/or Ara H 9 |
| Der f 15 | Cor a 1, Cor a 9, Pru du 6, Ana 0 1, Ana 0 2, Ana 0 3, Jug n 1, Jug r 2, Amb a 1, Bet v 1 - A, |
| | Can f 1, Cyn d 1, Der F 1 (19-321), Der F 1 (99-321), Der P2, Der F 2, DerP1 (del), Fel d 1, |
| | Fel d 2, Fel d 4, Lit v 1, Lol p 5a, Phl p 1, Phl p 5, Der f 18, Zen-1, Cte f 1, Api m1, Api m2, |
| | Api m3, Api m5, Api m10, Ves v1, Ves v2, Ves v3, Ves v5, Pol d1, Pol d5, Ara H1, Ara H2, Ara H3, |
| | Cry J1, Cry J2, Cry J3, CJP-4, CJP-6, CJP-8, CPA63, CJP38, Cha o 1, Jun a 1, Jun v 1, Cup a 1, |
| | Jun o 1, Cup s 1, Cha o 2, Jun a 2, Cup a 2, Jun a 3, Jun r 3, Cup s 3, |
| | Cup a 3, Ch4A, Ch4-1, PT-1, LTP, Ara H 6, Ara H 8, and/or Ara H 9 |
| Der f 18 | Cor a 1, Cor a 9, Pru du 6, Ana 0 1, Ana 0 2, Ana 0 3, Jug n 1, Jug r 2, Amb a 1, Bet v 1-A, |
| | Can f 1, Cyn d 1, Der F 1 (19-321), Der F 1 (99-321), Der P2, Der F 2, DerP1 (del), Fel d 1, |
| | Fel d 2, Fel d 4, Lit v 1, Lol p 5a, Phl p 1, Phl p 5, Der f 15, Zen-1, Cte f 1, Api m1, Api m2, |
| | Api m3, Api m5, Api m10, Ves v1, Ves v2, Ves v3, Ves v5, Pol d1, Pol d5, Ara H1, Ara H2, Ara H3, |
| | Cry J1, Cry J2, Cry J3, CJP-4, CJP-6, CJP-8, CPA63, CJP38, Cha o 1, Jun a 1, Jun v 1, |
| | Cup a 1, Jun o 1, Cup s 1, Cha o 2, Jun a 2, Cup a 2, Jun a 3, Jun r 3, Cup s 3, |
| | Cup a 3, Ch4A, Ch4-1, PT-1, LTP, Ara H 6, Ara H 8, and/or Ara H 9 |
| Zen-1 | Cor a 1, Cor a 9, Pru du 6, Ana 0 1, Ana 0 2, Ana 0 3, Jug n 1, Jug r 2, Amb a 1, Bet v 1-A, Can f 1, |
| | Cyn d 1, Der F 1 (19-321), Der F 1 (99-321), Der P2, Der F 2, DerP1 (del), Fel d 1, Fel d 2, Fel d 4, |
| | Lit v 1, Lol p 5a, Phl p 1, Phl p 5, Der f 15, Der f 18, Cte f 1, Api m1, Api m2, Api m3, |
| | Api m5, Api m10, Ves v1, Ves v2, Ves v3, Ves v5, Pol d1, Pol d5, Ara H1, Ara H2, Ara H3, |
| | Cry J1, Cry J2, Cry J3, CJP-4, CJP-6, CJP-8, CPA63, CJP38, Cha o 1, Jun a 1, Jun v 1, Cup a 1, |
| | Jun o 1, Cup s 1, Cha o 2, Jun a 2, Cup a 2, Jun a 3, Jun r 3, Cup s 3, |
| | Cup a 3, Ch4A, Ch4-1, PT-1, LTP, Ara H 6, Ara H 8, and/or Ara H 9 |
| Cte f 1 | Cor a 1, Cor a 9, Pru du 6, Ana 0 1, Ana 0 2, Ana 0 3, Jug n 1, Jug r 2, Amb a 1, Bet v 1-A, Can f 1, |
| | Cyn d 1, Der F 1 (19-321), Der F 1 (99-321), Der P2, Der F 2, DerP1 (del), Fel d 1, Fel d 2, |
| | Fel d 4, Lit v 1, Lol p 5a, Phl p 1, Phl p 5, Der f 15, Der f 18, Zen-1, Api m1, Api m2, |
| | Api m3, Api m5, Api m10, Ves v1, Ves v2, Ves v3, Ves v5, Pol d1, Pol d5, Ara H1, Ara H2, |
| | Ara H3, Cry J1, Cry J2, Cry J3, CJP-4, CJP-6, CJP-8, CPA63, CJP38, Cha o 1, Jun a 1, |
| | Jun v 1, Cup a 1, Jun o 1, Cup s 1, Cha o 2, Jun a 2, Cup a 2, Jun a 3, Jun r 3, |
| | Cup s 3, Cup a 3, Ch4A, Ch4-1, PT-1, LTP, Ara H 6, Ara H 8, and/or Ara H 9 |
| Api m1 | Cora 1, Cor a 9, Pru du 6, Ana 0 1, Ana 0 2, Ana 0 3, Jugn 1, Jug r 2, Amb a 1, Bet v 1-A, Can f 1, |
| | Cyn d 1, Der F 1 (19-321), Der F 1 (99-321), Der P2, Der F 2, DerP1 (del), Fel d 1, Fel d 2, Fel d 4, |
| | Lit v 1, Lol p 5a, Phl p 1, Phl p 5, Der f 15, Der f 18, Zen-1, Cte f 1, Api m2, Api m3, |
| | Api m5, Api m10, Ves v1, Ves v2, Ves v3, Ves v5, Pol d1, Pol d5, Ara H1, Ara H2, Ara H3, Cry J1, |
| | Cry J2, Cry J3, CJP-4, CJP-6, CJP-8, CPA63, CJP38, Cha o 1, Jun a 1, Jun v 1, Cup a 1, |
| | Jun o 1, Cup s 1, Cha o 2, Jun a 2, Cup a 2, Jun a 3, Jun r 3, |
| | Cup s 3, Cup a 3, Ch4A, Ch4-1, PT-1, LTP, Ara H 6, Ara H 8, and/or Ara H 9 |
| Api m2 | Cora 1, Cora 9, Pru du 6, Ana 0 1, Ana 0 2, Ana 0 3, Jug n 1, Jug r 2, Amb a 1, Bet v 1-A, Can f 1, |
| | Cyn d 1, Der F 1 (19-321), Der F 1 (99-321), Der P2, Der F 2, DerP1 (del), Fel d 1, Fel d 2, |
| | Fel d4, Lit v 1, Lol p 5a, Phl p 1, Phl p 5, Der f 15, Der f 18, Zen-1, Cte f 1, Api m1, Api m3, |
| | Api m5, Api m10, Ves v1, Ves v2, Ves v3, Ves v5, Pol d1, Pol d5, Ara H1, Ara H2, Ara H3, |
| | Cry J1, Cry J2, Cry J3, CJP-4, CJP-6, CJP-8, CPA63, CJP38, Cha o 1, Jun a 1, |
| | Jun v 1, Cup a 1, Jun o 1, Cup s 1, Cha o 2, Jun a 2, Cup a 2, Jun a 3, Jun r 3, |
| | Cup s 3, Cup a 3, Ch4A, Ch4-1, PT-1, LTP, Ara H 6, Ara H 8, and/or Ara H 9 |
| Api m3 | Cor a 1, Cor a 9, Pru du 6, Ana 0 1, Ana 0 2, Ana 0 3, Jug n 1, Jug r 2, Amb a 1, Bet v 1-A, |
| | Can f 1, Cyn d 1, Der F 1 (19-321), Der F 1 (99-321), Der P2, Der F 2, DerP1 (del), Fel d 1, |
| | Fel d 2, Fel d 4, Lit v 1, Lol p 5a, Phl p 1, Phl p 5, Der f 15, Der f 18, Zen-1, Cte f 1, Api m1, |
| | Api m2, Api m5, Api m10, Ves v1, Ves v2, Ves v3, Ves v5, Pol d1, Pol d5, Ara H1, Ara H2, Ara H3, |
| | Cry J1, Cry J2, Cry J3, CJP-4, CJP-6, CJP-8, CPA63, CJP38, Cha o 1, Jun a 1, Jun v 1, |
| | Cup a 1, Jun o 1, Cup s 1, Cha o 2, Jun a 2, Cup a 2, Jun a 3, Jun r 3, |
| | Cup s 3, Cup a 3, Ch4A, Ch4-1, PT-1, LTP, Ara H 6, Ara H 8, and/or Ara H 9 |
| Api m5 | Cor a 1, Cor a 9, Pru du 6, Ana 0 1, Ana 0 2, Ana 0 3, Jug n 1, Jug r 2, Amb a 1, Bet v 1-A, |
| | Can f 1, Cyn d 1, Der F 1 (19-321), Der F 1 (99-321), Der P2, Der F 2, DerP1 (del), Fel d 1, |
| | Fel d 2, Fel d 4, Lit v 1, Lol p 5a, Phl p 1, Phl p 5, Der f 15, Der f 18, Zen-1, Cte f 1, Api m1, |
| | Api m2, Api m3, Api m10, Ves v1, Ves v2, Ves v3, Ves v5, Pol d1, Pol d5, Ara H1, Ara H2, Ara H3, |
| | Cry J1, Cry J2, Cry J3, CJP-4, CJP-6, CJP-8, CPA63, CJP38, Cha o 1, Jun a 1, Jun v 1, |
| | Cup a 1, Jun o 1, Cup s 1, Cha o 2, Jun a 2, Cup a 2, Jun a 3, Jun r 3, |
| | Cup s 3, Cup a 3, Ch4A, Ch4-1, PT-1, LTP, Ara H 6, Ara H 8, and/or Ara H 9 |
| Api m10 | Cor a 1, Cor a 9, Pru du 6, Ana 0 1, Ana 0 2, Ana 0 3, Jug n 1, Jug r 2, Amb a 1, Bet v 1-A, |
| | Can f 1, Cyn d 1, Der F 1 (19-321), Der F 1 (99-321), Der P2, Der F 2, DerP1 (del), Fel d 1, |
| | Fel d 2, Fel d 4, Lit v 1, Lol p 5a, Phl p 1, Phl p 5, Der f 15, Der f 18, Zen-1, Cte f 1, Api m1, |
| | Api m2, Api m3, Api m5, Ves v1, Ves v2, Ves v3, Ves v5, Pol d1, Pol d5, Ara H1, Ara H2, Ara H3, |
| | Cry J1, Cry J2, Cry J3, CJP-4, CJP-6, CJP-8, CPA63, CJP38, Cha o 1, Jun a 1, Jun v 1, |
| | Cup a 1, Jun o 1, Cup s 1, Cha o 2, Jun a 2, Cup a 2, Jun a 3, Jun r 3, Cup s 3, |
| | Cup a 3, Ch4A, Ch4-1, PT-1, LTP, Ara H 6, Ara H 8, and/or Ara H 9 |
| Ves v1 | Cor a 1, Cor a 9, Pru du 6, Ana 0 1, Ana 0 2, Ana 0 3, Jug n 1, Jug r 2, Amb a 1, Bet v 1-A, Can f 1, |
| | Cyn d 1, Der F 1 (19-321), Der F 1 (99-321), Der P2, Der F 2, DerP1 (del), Fel d 1, Fel d 2, Fel d 4, |
| | Lit v 1, Lol p 5a, Phl p 1, Phl p 5, Der f 15, Der f 18, Zen-1, Cte f 1, Api m1, Api m2, |
| | Api m3, Api m5, Api m10, Ves v2, Ves v3, Ves v5, Pol d1, Pol d5, Ara H1, Ara H2, Ara H3, |
| | Cry J1, Cry J2, Cry J3, CJP-4, CJP-6, CJP-8, CPA63, CJP38, Cha o 1, Jun a 1, Jun v 1, |
| | Cup a 1, Jun o 1, Cup s 1, Cha o 2, Jun a 2, Cup a 2, Jun a 3, Jun r 3, Cup s 3, Cup a 3, |
| | Ch4A, Ch4-1, PT-1, LTP, Ara H 6, Ara H 8, and/or Ara H 9 |
| Ves v2 | Cor a 1, Cor a 9, Pru du 6, Ana 0 1, Ana 0 2, Ana 0 3, Jug n 1, Jug r 2, Amb a 1, Bet v 1-A, Can f 1, |
| | Cyn d 1, Der F 1 (19-321), Der F 1 (99-321), Der P2, Der F 2, DerP1 (del), Fel d 1, Fel d 2, Fel d 4, |
| | Lit v 1, Lol p 5a, Phl p 1, Phl p 5, Der f 15, Der f 18, Zen-1, Cte f 1, Api m1, Api m2, Api m3, |
| | Api m5, Api m10, Ves v1, Ves v3, Ves v5, Pol d1, Pol d5, Ara H1, Ara H2, Ara H3, Cry J1, Cry J2, |
| | Cry J3, CJP-4, CJP-6, CJP-8, CPA63, CJP38, Cha o 1, Jun a 1, Jun v 1, Cup a 1, Jun o 1, |
| | Cup s 1, Cha o 2, Jun a 2, Cup a 2, Jun a 3, Jun r 3, Cup s 3, Cup a 3, Ch4A, |
| | Ch4-1, PT-1, LTP, Ara H 6, Ara H 8, and/or Ara H 9 |
| Ves v3 | Cor a 1, Cor a 9, Pru du 6, Ana 0 1, Ana 0 2, Ana 0 3, Jug n 1, Jug r 2, Amb a 1, Bet v 1-A, Can f 1, |
| | Cyn d 1, Der F 1 (19-321), Der F 1 (99-321), Der P2, Der F 2, DerP1 (del), Fel d 1, Fel d 2, Fel d 4, |
| | Lit v 1, Lol p 5a, Phl p 1, Phl p 5, Der f 15, Der f 18, Zen-1, Cte f 1, Api m1, Api m2, Api m3, |
| | Api m5, Api m10, Ves v1, Ves v2, Ves v5, Pol d1, Pol d5, Ara H1, Ara H2, Ara H3, Cry J1, Cry J2, |
| | Cry J3, CJP-4, CJP-6, CJP-8, CPA63, CJP38, Cha o 1, Jun a 1, Jun v 1, Cup a 1, Jun o 1, |
| | Cup s 1, Cha o 2, Jun a 2, Cup a 2, Jun a 3, Jun r 3, Cup s 3, Cup a 3, Ch4A, |
| | Ch4-1, PT-1, LTP, Ara H 6, Ara H 8, and/or Ara H 9 |
| Ves v5 | Cor a 1, Cor a 9, Pru du 6, Ana 0 1, Ana 0 2, Ana 0 3, Jug n 1, Jug r 2, Amb a 1, Bet v 1-A, Can f 1, |
| | Cyn d 1, Der F 1 (19-321), Der F 1 (99-321), Der P2, Der F 2, DerP1 (del), Fel d 1, Fel d 2, Fel d 4, |
| | Lit v 1, Lol p 5a, Phl p 1, Phl p 5, Der f 15, Der f 18, Zen-1, Cte f 1, Api m1, Api m2, Api m3, |
| | Api m5, Api m10, Ves v1, Ves v2, Ves v3, Pol d1, Pol d5, Ara H1, Ara H2, Ara H3, Cry J1, Cry J2, |
| | Cry J3, CJP-4, CJP-6, CJP-8, CPA63, CJP38, Cha o 1, Jun a 1, Jun v 1, Cup a 1, Jun o 1, |
| | Cup s 1, Cha o 2, Jun a 2, Cup a 2, Jun a 3, Jun r 3, Cup s 3, Cup a 3, Ch4A, |
| | Ch4-1, PT-1, LTP, Ara H 6, Ara H 8, and/or Ara H 9 |
| Pol d1 | Cor a 1, Cor a 9, Pru du 6, Ana 0 1, Ana 0 2, Ana 0 3, Jug n 1, Jug r 2, Amb a 1, Bet v 1-A, Can f 1, |
| | Cyn d 1, Der F 1 (19-321), Der F 1 (99-321), Der P2, Der F 2, DerP1 (del), Fel d 1, Fel d 2, Fel d 4, |
| | Lit v 1, Lol p 5a, Phl p 1, Phl p 5, Der f 15, Der f 18, Zen-1, Cte f 1, Api m1, Api m2, |
| | Api m3, Api m5, Api m10, Ves v1, Ves v2, Ves v3, Ves v5, Pol d5, Ara H1, Ara H2, Ara H3, |
| | Cry J1, Cry J2, Cry J3, CJP-4, CJP-6, CJP-8, CPA63, CJP38, Cha o 1, Jun a 1, Jun v 1, |
| | Cup a 1, Jun o 1, Cup s 1, Cha o 2, Jun a 2, Cup a 2, Jun a 3, Jun r 3, Cup s 3, Cup a 3, |
| | Ch4A, Ch4-1, PT-1, LTP, Ara H 6, Ara H 8, and/or Ara H 9 |
| Pol d5 | Cor a 1, Cor a 9, Pru du 6, Ana 0 1, Ana 0 2, Ana 0 3, Jug n 1, Jug r 2, Amb a 1, Bet v 1-A, |
| | Can f 1, Cyn d 1, Der F 1 (19-321), Der F 1 (99-321), Der P2, Der F 2, DerP1 (del), Fel d 1, |
| | Fel d 2, Fel d 4, Lit v 1, Lol p 5a, Phl p 1, Phl p 5, Der f 15, Der f 18, Zen-1, Cte f 1, Api m1, |
| | Api m2, Api m3, Api m5, Api m10, Ves v1, Ves v2, Ves v3, Ves v5, Pol d1, Ara H1, Ara H2, |
| | Ara H3, Cry J1, Cry J2, Cry J3, CJP-4, CJP-6, CJP-8, CPA63, CJP38, Cha o 1, Jun a 1, Jun v 1, |
| | Cup a 1, Jun o 1, Cup s 1, Cha o 2, Jun a 2, Cup a 2, Jun a 3, Jun r 3, Cup s 3, Cup a 3, Ch4A, |
| | Ch4-1, PT-1, LTP, Ara H 6, Ara H 8, and/or Ara H 9 |
| Ara H1 | Cor a 1, Cor a 9, Pru du 6, Ana 0 1, Ana 0 2, Ana 0 3, Jug n 1, Jug r 2, Amb a 1, Bet v 1-A, |
| | Can f 1, Cyn d 1, Der F 1 (19-321), Der F 1 (99-321), Der P2, Der F 2, DerP1 (del), Fel d 1, |
| | Fel d 2, Fel d 4, Lit v 1, Lol p 5a, Phl p 1, Phl p 5, Der f 15, Der f 18, Zen-1, Cte f 1, Api m1, |
| | Api m2, Api m3, Api m5, Api m10, Ves v1, Ves v2, Ves v3, Ves v5, Pol d1, Pol d5, Ara H2, |
| | Ara H3, Cry J1, Cry J2, Cry J3, CJP-4, CJP-6, CJP-8, CPA63, CJP38, Cha o 1, Jun a 1, Jun v 1, |
| | Cup a 1, Jun o 1, Cup s 1, Cha o 2, Jun a 2, Cup a 2, Jun a 3, Jun r 3, Cup s 3, Cup a 3, Ch4A, |
| | Ch4-1, PT-1, LTP, Ara H 6, Ara H 8, and/or Ara H 9 |
| Ara H2 | Cor a 1, Cor a 9, Pru du 6, Ana 0 1, Ana 0 2, Ana 0 3, Jug n 1, Jug r 2, Amb a 1, Bet v 1-A, |
| | Can f 1, Cyn d 1, Der F 1 (19-321), Der F 1 (99-321), Der P2, Der F 2, DerP1 (del), Fel d 1, |
| | Fel d 2, Fel d 4, Lit v 1, Lol p 5a, Phl p 1, Phl p 5, Der f 15, Der f 18, Zen-1, Cte f 1, Api m1, |
| | Api m2, Api m3, Api m5, Api m10, Ves v1, Ves v2, Ves v3, Ves v5, Pol d1, Pol d5, Ara H1, Ara H3, |
| | Cry J1, Cry J2, Cry J3, CJP-4, CJP-6, CJP-8, CPA63, CJP38, Cha o 1, Jun a 1, Jun v 1, Cup a 1, |
| | Jun o 1, Cup s 1, Cha o 2, Jun a 2, Cup a 2, Jun a 3, Jun r 3, Cup s 3, Cup a 3, Ch4A, |
| | Ch4-1, PT-1, LTP, Ara H 6, Ara H 8, and/or Ara H 9 |
| Ara H3 | Cor a 1, Cor a 9, Pru du 6, Ana 0 1, Ana 0 2, Ana 0 3, Jug n 1, Jug r 2, Amb a 1, Bet v 1-A, |
| | Can f 1, Cyn d 1, Der F 1 (19-321), Der F 1 (99-321), Der P2, Der F 2, DerP1 (del), Fel d 1, |
| | Fel d 2, Fel d 4, Lit v 1, Lol p 5a, Phl p 1, Phl p 5, Der f 15, Der f 18, Zen-1, Cte f 1, |
| | Api m1, Api m2, Api m3, Api m5, Api m10, Ves v1, Ves v2, Ves v3, Ves v5, Pol d1, Pol d5, Ara H1, |
| | Ara H2, Cry J1, Cry J2, Cry J3, CJP-4, CJP-6, CJP-8, CPA63, CJP38, Cha o 1, Jun a 1, Jun v 1, |
| | Cup a 1, Jun o 1, Cup s 1, Cha o 2, Jun a 2, Cup a 2, Jun a 3, Jun r 3, Cup s 3, Cup a 3, Ch4A, |
| | Ch4-1, PT-1, LTP, Ara H 6, Ara H 8, and/or Ara H 9 |
| Cry J1 | Cor a 1, Cor a 9, Pru du 6, Ana 0 1, Ana 0 2, Ana 0 3, Jug n 1, Jug r 2, Amb a 1, Bet v 1-A, |
| | Can f 1, Cyn d 1, Der F 1 (19-321), Der F 1 (99-321), Der P2, Der F 2, DerP1 (del), Fel d 1, |
| | Fel d 2, Fel d 4, Lit v 1, Lol p 5a, Phl p 1, Phl p 5, Der f 15, Der f 18, Zen-1, |
| | Cte f 1, Api m1, Api m2, Api m3, Api m5, Api m10, Ves v1, Ves v2, Ves v3, Ves v5, |
| | Pol d1, Pol d5,Ara H1, Ara H2, Ara H3, Cry J2, Cry J3, CJP-4, CJP-6, CJP-8, |
| | CPA63, CJP38, Cha o 1, Jun a 1, Jun v 1, Cup a 1, Jun o 1, Cup s 1, Cha o 2, |
| | Jun a 2, Cup a 2, Jun a 3, Jun r 3, Cup s 3, Cup a 3, |
| | Ch4A, Ch4-1, PT-1, LTP, Ara H 6, Ara H 8, and/or Ara H 9 |
| Cry J2 | Cor a 1, Cor a 9, Pru du 6, Ana 0 1, Ana 0 2, Ana 0 3, Jug n 1, Jug r 2, Amb a 1, Bet v 1-A, |
| | Can f 1, Cyn d 1, Der F 1 (19-321), Der F 1 (99-321), Der P2, Der F 2, DerP1 (del), Fel d 1, |
| | Fel d 2, Fel d 4, Lit v 1, Lol p 5a, Phl p 1, Phl p 5, Der f 15, Der f 18, Zen-1, Cte f 1, Api m1, |
| | Api m2, Api m3, Api m5, Api m10, Ves v1, Ves v2, Ves v3, Ves v5, Pol d1, Pol d5, Ara H1, Ara H2, Ara H3, |
| | Cry J1, Cry J3, CJP-4, CJP-6, CJP-8, CPA63, CJP38, Cha o 1, Jun a 1, Jun v 1, |
| | Cup a 1, Jun o 1, Cup s 1, Cha o 2, Jun a 2, Cup a 2, Jun a 3, Jun r 3, Cup s 3, Cup a 3, |
| | Ch4A, Ch4-1, PT-1, LTP, Ara H 6, Ara H 8, and/or Ara H 9 |
| Cry J3 | Cor a 1, Cor a 9, Pru du 6, Ana 0 1, Ana 0 2, Ana 0 3, Jug n 1, Jug r 2, Amb a 1, Bet v 1-A, |
| | Can f 1, Cyn d 1, Der F 1 (19-321), Der F 1 (99-321), Der P2, Der F 2, DerP1 (del), Fel d 1, Fel d 2, |
| | Fel d 4, Lit v 1, Lol p 5a, Phl p 1, Phl p 5, Der f 15, Der f 18, Zen-1, Cte f 1, Api m1, Api m2, |
| | Api m3, Api m5, Api m10, Ves v1, Ves v2, Ves v3, Ves v5, Pol d1, Pol d5, Ara H1, Ara H2, Ara H3, |
| | Cry J1, Cry J2, CJP-4, CJP-6, CJP-8, CPA63, CJP38, Cha o 1, Jun a 1, Jun v 1, Cup a 1, |
| | Jun o 1, Cup s 1, Cha o 2, Jun a 2, Cup a 2, Jun a 3, Jun r 3, Cup s 3, Cup a 3, Ch4A, |
| | Ch4-1, PT-1, LTP, Ara H 6, Ara H 8, and/or Ara H 9 |
| CJP-4 | Cor a 1, Cor a 9, Pru du 6, Ana 0 1, Ana 0 2, Ana 0 3, Jug n 1, Jug r 2, Amb a 1, Bet v 1-A, |
| | Can f 1, Cyn d 1, Der F 1 (19-321), Der F 1 (99-321), Der P2, Der F 2, DerP1 (del), Fel d 1, |
| | Fel d 2, Fel d 4, Lit v 1, Lol p 5a, Phl p 1, Phl p 5, Der f 15, Der f 18, Zen-1, Cte f 1, Api m1, Api m2, |
| | Api m3, Api m5, Api m10, Ves v1, Ves v2, Ves v3, Ves v5, Pol d1, Pol d5, Ara H1, Ara H2, |
| | Ara H3, Cry J1, Cry J2, Cry J3, CJP-6, CJP-8, CPA63, CJP38, Cha o 1, Jun a 1, Jun v 1, |
| | Cup a 1, Jun o 1, Cup s 1, Cha o 2, Jun a 2, Cup a 2, Jun a 3, Jun r 3, Cup s 3, Cup a 3, |
| | Ch4A, Ch4-1, PT-1, LTP, Ara H 6, Ara H 8, and/or Ara H 9 |
| CJP-6 | Cor a 1, Cor a 9, Pru du 6, Ana 0 1, Ana 0 2, Ana 0 3, Jug n 1, Jug r 2, Amb a 1, Bet v 1-A, |
| | Can f 1, Cyn d 1, Der F 1 (19-321), Der F 1 (99-321), Der P2, Der F 2, DerP1 (del), Fel d 1, |
| | Fel d 2, Fel d 4, Lit v 1, Lol p 5a, Phl p 1, Phl p 5, Der f 15, Der f 18, Zen-1, Cte f 1, Api m1, Api m2, |
| | Api m3, Api m5, Api m10, Ves v1, Ves v2, Ves v3, Ves v5, Pol d1, Pol d5, Ara H1, Ara H2, Ara H3, |
| | Cry J1, Cry J2, Cry J3, CJP-4, CJP-8, CPA63, CJP38, Cha o 1, Jun a 1, Jun v 1, Cup a 1, Jun o 1, |
| | Cup s 1, Cha o 2, Jun a 2, Cup a 2, Jun a 3, Jun r 3, Cup s 3, Cup a 3, Ch4A, |
| | Ch4-1, PT-1, LTP, Ara H 6, Ara H 8, and/or Ara H 9 |
| CJP-8 | Cor a 1, Cor a 9, Pru du 6, Ana 0 1, Ana 0 2, Ana 0 3, Jug n 1, Jug r 2, Amb a 1, Bet v 1-A, |
| | Can f 1, Cyn d 1, Der F 1 (19-321), Der F 1 (99-321), Der P2, Der F 2, DerP1 (del), Fel d 1, |
| | Fel d 2, Fel d 4, Lit v 1, Lol p 5a, Phl p 1, Phl p 5, Der f 15, Der f 18, Zen-1, Cte f 1, Api m1, |
| | Api m2, Api m3, Api m5, Api m10, Ves v1, Ves v2, Ves v3, Ves v5, Pol d1, Pol d5, Ara H1, Ara H2, |
| | Ara H3, Cry J1, Cry J2, Cry J3, CJP-4, CJP-6, CPA63, CJP38, Cha o 1, Jun a 1, Jun v 1, |
| | Cup a 1, Jun o 1, Cup s 1, Cha o 2, Jun a 2, Cup a 2, Jun a 3, Jun r 3, Cup s 3, Cup a 3, Ch4A, |
| | Ch4-1, PT-1, LTP, Ara H 6, Ara H 8, and/or Ara H 9 |
| CPA63 | Cor a 1, Cor a 9, Pru du 6, Ana 0 1, Ana 0 2, Ana 0 3, Jug n 1, Jug r 2, Amb a 1, Bet v 1-A, |
| | Can f 1, Cyn d 1, Der F 1 (19-321), Der F 1 (99-321), Der P2, Der F 2, DerP1 (del), Fel d 1, |
| | Fel d 2, Fel d 4, Lit v 1, Lol p 5a, Phl p 1, Phl p 5, Der f 15, Der f 18, Zen-1, Cte f 1, Api m1, Api m2, |
| | Api m3, Api m5, Api m10, Ves v1, Ves v2, Ves v3, Ves v5, Pol d1, Pol d5, Ara H1, Ara H2, Ara H3, |
| | Cry J1, Cry J2, Cry J3, CJP-4, CJP-6, CJP-8, CJP38, Cha o 1, Jun a 1, Jun v 1, Cup a 1, |
| | Jun o 1, Cup s 1, Cha o 2, Jun a 2, Cup a 2, Jun a 3, Jun r 3, Cup s 3, Cup a 3, Ch4A, |
| | Ch4-1, PT-1, LTP, Ara H 6, Ara H 8, and/or Ara H 9 |
| CJP38 | Cor a 1, Cor a 9, Pru du 6, Ana 0 1, Ana 0 2, Ana 0 3, Jug n 1, Jug r 2, Amb a 1, Bet v 1-A, Can f 1, |
| | Cyn d 1, Der F 1 (19-321), Der F 1 (99-321), Der P2, Der F 2, DerP1 (del), Fel d 1, Fel d 2, Fel d 4, |
| | Lit v 1, Lol p 5a, Phl p 1, Phl p 5, Der f 15, Der f 18, Zen-1, Cte f 1, Api m1, Api m2, |
| | Api m3, Api m5, Api m10, Ves v1, Ves v2, Ves v3, Ves v5, Pol d1, Pol d5, Ara H1, Ara H2, Ara H3, |
| | Cry J1, Cry J2, Cry J3, CJP-4, CJP-6, CJP-8, CPA63, Cha o 1, Jun a 1, Jun v 1, Cup a 1, Jun o 1, |
| | Cup s 1, Cha o 2, Jun a 2, Cup a 2, Jun a 3, Jun r 3, Cup s 3, Cup a 3, Ch4A, |
| | Ch4-1, PT-1, LTP, Ara H 6, Ara H 8, and/or Ara H 9 |
| Cha o 1 | Cor a 1, Cor a 9, Pru du 6, Ana 0 1, Ana 0 2, Ana 0 3, Jug n 1, Jug r 2, Amb a 1, Bet v 1-A, |
| | Can f 1, Cyn d 1, Der F 1 (19-321), Der F 1 (99-321), Der P2, Der F 2, DerP1 (del), Fel d 1, Fel d 2, |
| | Fel d 4, Lit v 1, Lol p 5a, Phl p 1, Phl p 5, Der f 15, Der f 18, Zen-1, Cte f 1, Api m1, Api m2, |
| | Api m3, Api m5, Api m10, Ves v1, Ves v2, Ves v3, Ves v5, Pol d1, Pol d5, Ara H1, Ara H2, Ara H3, |
| | Cry J1, Cry J2, Cry J3, CJP-4, CJP-6, CJP-8, CPA63, CJP38, Jun a 1, Jun v 1, Cup a 1, Jun o 1, |
| | Cup s 1, Cha o 2, Jun a 2, Cup a 2, Jun a 3, Jun r 3, Cup s 3, Cup a 3, Ch4A, |
| | Ch4-1, PT-1, LTP, Ara H 6, Ara H 8, and/or Ara H 9 |
| Jun a 1 | Cor a 1, Cor a 9, Pru du 6, Ana 0 1, Ana 0 2, Ana 0 3, Jug n 1, Jug r 2, Amb a 1, Bet v 1-A, Can f 1, |
| | Cyn d 1, Der F 1 (19-321), Der F 1 (99-321), Der P2, Der F 2, DerP1 (del), Fel d 1, Fel d 2, Fel d 4, |
| | Lit v 1, Lol p 5a, Phl p 1, Phl p 5, Der f 15, Der f 18, Zen-1, Cte f 1, Api m1, Api m2, |
| | Api m3, Api m5, Api m10, Ves v1, Ves v2, Ves v3, Ves v5, Pol d1, Pol d5, Ara H1, Ara H2, Ara H3, |
| | Cry J1, Cry J2, Cry J3, CJP-4, CJP-6, CJP-8, CPA63, CJP38, Cha o 1, Jun v 1, Cun a 1, Jun o 1, |
| | Cup s 1, Cha o 2. Jun a 2, Cup a 2, Jun a 3, Jun r 3, Cup s 3, Cup a 3, Ch4A, |
| | Ch4-1, PT-1, LTP, Ara H 6, Ara H 8, and/or Ara H 9 |
| Jun v 1 | Cor a 1, Cor a 9, Pru du 6, Ana 0 1, Ana 0 2, Ana 0 3, Jug n 1, Jug r 2, Amb a 1, Bet v 1-A, |
| | Can f 1, Cyn d 1, Der F 1 (19-321), Der F 1 (99-321), Der P2, Der F 2, DerP1 (del), Fel d 1, Fel d 2, |
| | Fel d 4, Lit v 1, Lol p 5a, Phl p 1, Phl p 5, Der f 15, Der f 18, Zen-1, Cte f 1, Api m1, Api m2, |
| | Api m3, Api m5, Api m10, Ves v1, Ves v2, Ves v3, Ves v5, Pol d1, Pol d5, Ara H1, Ara H2, Ara H3, |
| | Cry J1, Cry J2, Cry J3, CJP-4, CJP-6, CJP-8, CPA63, CJP38, Cha o 1, Jun a 1, Cup a 1, |
| | Jun o 1, Cup s 1, Cha o 2, Jun a 2, Cup a 2, Jun a 3, Jun r 3, Cup s 3, Cup a 3, Ch4A, |
| | Ch4-1, PT-1, LTP, Ara H 6, Ara H 8, and/or Ara H 9 |
| Cup a 1 | Cor a 1, Cor a 9, Pru du 6, Ana 0 1, Ana 0 2, Ana 0 3, Jug n 1, Jug r 2, Amb a 1, Bet v 1-A, |
| | Can f 1, Cyn d 1, Der F 1 (19-321), Der F 1 (99-321), Der P2, Der F 2, DerP1 (del), Fel d 1, |
| | Fel d 2, Fel d 4, Lit v 1, Lol p 5a, Phl p 1, Phl p 5, Der f 15, Der f 18, Zen-1, Cte f 1, Api m1, |
| | Api m2, Api m3, Api m5, Api m10, Ves v1, Ves v2, Ves v3, Ves v5, Pol d1, Pol d5, Ara H1, Ara H2, |
| | Ara H3, Cry J1, Cry J2, Cry J3, CJP-4, CJP-6, CJP-8, CPA63, CJP38, Cha o 1, Jun a 1, Jun v 1, |
| | Jun o 1, Cup s 1, Cha o 2, Jun a 2, Cup a 2, Jun a 3, Jun r 3, Cup s 3, Cup a 3, Ch4A, |
| | Ch4-1, PT-1, LTP, Ara H 6, Ara H 8, and/or Ara H 9 |
| Jun o 1 | Cor a 1, Cor a 9, Pru du 6, Ana 0 1, Ana 0 2, Ana 0 3, Jug n 1, Jug r 2, Amb a 1, Bet v 1-A, |
| | Can f 1, Cyn d 1, Der F 1 (19-321), Der F 1 (99-321), Der P2, Der F 2, DerP1 (del), Fel d 1, Fel d 2, |
| | Fel d 4, Lit v 1, Lol p 5a, Phl p 1, Phl p 5, Der f 15, Der f 18, Zen-1, Cte f 1, Api m1, Api m2, |
| | Api m3, Api m5, Api m10, Ves v1, Ves v2, Ves v3, Ves v5, Pol d1, Pol d5, Ara H1, Ara H2, Ara H3, |
| | Cry J1, Cry J2, Cry J3, CJP-4, CJP-6, CJP-8, CPA63, CJP38, Cha o 1, Jun a 1, Jun v 1, Cup a 1, |
| | Cup s 1, Cha o 2, Jun a 2, Cup a 2, Jun a 3, Jun r 3, Cup s 3, Cup a 3, Ch4A, |
| | Ch4-1, PT-1, LTP, Ara H 6, Ara H 8, and/or Ara H 9 |
| Cup s 1 | Cor a 1, Cor a 9, Pru du 6, Ana 0 1, Ana 0 2, Ana 0 3, Jug n 1, Jug r 2, Amb a 1, Bet v 1-A, |
| | Can f 1, Cyn d 1, Der F 1 (19-321), Der F 1 (99-321), Der P2, Der F 2, DerP1 (del), Fel d 1, |
| | Fel d 2, Fel d 4, Lit v 1, Lol p 5a, Phl p 1, Phl p 5, Der f 15, Der f 18, Zen-1, Cte f 1, Api m1, |
| | Api m2, Api m3, Api m5, Api m10, Ves v1, Ves v2, Ves v3, Ves v5, Pol d1, Pol d5, Ara H1, Ara H2, |
| | Ara H3, Cry J1, Cry J2, Cry J3, CJP-4, CJP-6, CJP-8, CPA63, CJP38, Cha o 1, Jun a 1, |
| | Jun v 1, Cup a 1, Jun o 1, Cha o 2, Jun a 2, Cup a 2, Jun a 3, Jun r 3, |
| | Cup s 3, Cup a 3, Ch4A, Ch4-1, PT-1, LTP, Ara H 6, Ara H 8, and/or Ara H 9 |
| Cha o 2 | Cor a 1, Cor a 9, Pru du 6, Ana 0 1, Ana 0 2, Ana 0 3, Jug n 1, Jug r 2, Amb a 1, Bet v 1-A, |
| | Can f 1, Cyn d 1, Der F 1 (19-321), Der F 1 (99-321), Der P2, Der F 2, DerP 1 (del), Fel d 1, |
| | Fel d 2, Fel d 4, Lit v 1, Lol p 5a, Phl p 1, Phl p 5, Der f 15, Der f 18, Zen-1, Cte f 1, Api m 1, |
| | Api m2, Api m3, Api m5, Api m10, Ves v1, Ves v2, Ves v3, Ves v5, Pol d1, Pol d5, Ara H1, Ara H2, |
| | Ara H3, Cry J1, Cry J2, Cry J3, CJP-4, CJP-6, CJP-8, CPA63, CJP38, Cha o 1, |
| | Jun a 1, Jun v 1, Cup a 1, Jun o 1, Cup s 1, Jun a 2, Cup a 2, Jun a 3, Jun r 3, |
| | Cup s 3, Cup a 3, Ch4A, Ch4-1, PT-1, LTP, Ara H 6, Ara H 8, and/or Ara H 9 |
| Jun a 2 | Cor a 1, Cor a 9, Pru du 6, Ana 0 1, Ana 0 2, Ana 0 3, Jug n 1, Jug r 2, Amb a 1, Bet v 1-A, |
| | Can f 1, Cyn d 1, Der F 1 (19-321), Der F 1 (99-321), Der P2, Der F 2, DerP1 (del), Fel d 1, |
| | Fel d 2, Fel d 4, Lit v 1, Lol p 5a, Phl p 1, Phl p 5, Der f 15, Der f 18, Zen-1, Cte f 1, Api m1, |
| | Api m2, Api m3, Api m5, Api m10, Ves v1, Ves v2, Ves v3, Ves v5, Pol d1, Pol d5, Ara H1, Ara H2, |
| | Ara H3, Cry J1, Cry J2, Cry J3, CJP-4, CJP-6, CJP-8, CPA63, CJP38, Cha o 1, Jun a 1, |
| | Jun v 1, Cup a 1, Jun o 1, Cup s 1, Cha o 2, Cup a 2, Jun a 3, Jun r 3, |
| | Cup s 3, Cup a 3, Ch4A, Ch4-1, PT-1, LTP, Ara H 6, Ara H 8, and/or Ara H 9 |
| Cup a 2 | Cor a 1, Cor a 9, Pru du 6, Ana 0 1, Ana 0 2, Ana 0 3, Jug n 1, Jug r 2, Amb a 1, Bet v 1-A, |
| | Can f 1, Cyn d 1, Der F 1 (19-321), Der F 1 (99-321), Der P2, Der F 2, DerP1 (del), Fel d 1, |
| | Fel d 2, Fel d 4, Lit v 1, Lol p 5a, Phl p 1, Phl p 5, Der f 15, Der f 18, Zen-1, Cte f 1, Api m1, |
| | Api m2, Api m3, Api m5, Api m10, Ves v1, Ves v2, Ves v3, Ves v5, Pol d1, Pol d5, Ara H1, Ara H2, |
| | Ara H3, Cry J1, Cry J2, Cry J3, CJP-4, CJP-6, CJP-8, CPA63, CJP38, Cha o 1, Jun a 1, |
| | Jun v 1, Cup a 1, Jun o 1, Cup s 1, Cha o 2, Jun a 2, Jun a 3, Jun r 3, |
| | Cup s 3, Cup a 3, Ch4A, Ch4-1, PT-1, LTP, Ara H 6, Ara H 8, and/or Ara H 9 |
| Jun a 3 | Cor a 1, Cor a 9, Pru du 6, Ana 0 1, Ana 0 2, Ana 0 3, Jug n 1, Jug r 2, Amb a 1, Bet v 1-A, |
| | Can f 1, Cyn d 1, Der F 1 (19-321), Der F 1 (99-321), Der P2, Der F 2, DerP1 (del), Fel d 1, Fel d 2, Fel d 4, |
| | Lit v 1, Lol p 5a, Phl p 1, Phl p 5, Der f 15, Der f 18, Zen-1, Cte f 1, Api m1, Api m2, Api m3, |
| | Api m5, Api m10, Ves v1, Ves v2, Ves v3, Ves v5, Pol d1, Pol d5, Ara H1, Ara H2, Ara H3, |
| | Cry J1, Cry J2, Cry J3, CJP-4, CJP-6, CJP-8, CPA63, CJP38, Cha o 1, |
| | Jun a 1, Jun v 1, Cup a 1, Jun o 1, Cup s 1, Cha o 2, Jun a 2, Cup a 2, Jun r 3, |
| | Cup s 3, Cup a 3, Ch4A, Ch4-1, PT-1, LTP, Ara H 6, Ara H 8, and/or Ara H 9 |
| Jun r 3 | Cor a 1, Cor a 9, Pru du 6, Ana 0 1, Ana 0 2, Ana 0 3, Jug n 1, Jug r 2, Amb a 1, Bet v 1-A, Can f 1, |
| | Cyn d 1, Der F 1 (19-321), Der F 1 (99-321), Der P2, Der F 2, DerP1 (del), Fel d 1, Fel d 2, Fel d 4, |
| | Lit v 1, Lol p 5a, Phl p 1, Phl p 5, Der f 15, Der f 18, Zen-1, Cte f 1, Api m1, Api m2, |
| | Api m3, Api m5, Api m10, Ves v1, Ves v2, Ves v3, Ves v5, Pol d1, Pol d5, Ara H1, Ara H2, Ara H3, Cry J1, |
| | Cry J2, Cry J3, CJP-4, CJP-6, CJP-8, CPA63, CJP38, Cha o 1, Jun a 1, Jun v 1, Cup a 1, Jun o 1, Cup s 1, Cha o 2, |
| | Jun a 2, Cup a 2, Jun a 3, Cup s 3, Cup a 3, Ch4A, Ch4-1, PT-1, LTP, Ara H 6, Ara H 8, and/or Ara H 9 |
| Cup s 3 | Cor a 1, Cor a 9, Pru du 6, Ana 0 1, Ana 0 2, Ana 0 3, Jug n 1, Jug r 2, Amb a 1, Bet v 1-A, Can f 1, |
| | Cyn d 1, Der F 1 (19-321), Der F 1 (99-321), Der P2, Der F 2, DerP1 (del), Fel d 1, Fel d 2, Fel d 4, |
| | Lit v 1, Lol p 5a, Phl p 1, Phl p 5, Der f 15, Der f 18, Zen-1, Cte f 1, |
| | Api m1, Api m2, Api m3, Api m5, Api m10, Ves v1, Ves v2, Ves v3, Ves v5, Pol d1, Pol d5, Ara H1, |
| | Ara H2, Ara H3, Cry J1, Cry J2, Cry J3, CJP-4, CJP-6, CJP-8, CPA63, CJP38, |
| | Cha o 1, Jun a 1, Jun v 1, Cup a 1, Jun o 1, Cup s 1, Cha o 2, Jun a 2, |
| | Cup a 2, Jun a 3, Jun r 3, Cup a 3, Ch4A, Ch4-1, PT-1, LTP, Ara H 6, Ara H 8, |
| | and/or Ara H 9 |
| Cup a 3 | Cor a 1, Cor a 9, Pru du 6, Ana 0 1, Ana 0 2, Ana 0 3, Jug n 1, Jug r 2, Amb a 1, Bet v 1-A, Can f 1, |
| | Cyn d 1, Der F 1 (19-321), Der F 1 (99-321), Der P2, Der F 2, DerP1 (del), Fel d 1, Fel d 2, Fel d 4, |
| | Lit v 1, Lol p 5a, Phl p 1, Phl p 5, Der f 15, Der f 18, Zen-1, Cte f 1, Api m1, Api m2, |
| | Api m3, Api m5, Api m10, Ves v1, Ves v2, Ves v3, Ves v5, Pol d1, Pol d5, Ara H1, Ara H2, |
| | Ara H3, Cry J1, Cry J2, Cry J3, CJP-4, CJP-6, CJP-8, CPA63, CJP38, Cha o 1, Jun a 1, Jun v 1, |
| | Cup a 1, Jun o 1, Cup s 1, Cha o 2, Jun a 2, Cup a 2, Jun a 3, Jun r 3, Cup s 3, Ch4A, Ch4-1, |
| | PT-1, LTP, Ara H 6, Ara H 8, and/or Ara H 9 |
| Ch4A | Cor a 1, Cor a 9, Pru du 6, Ana 0 1, Ana 0 2, Ana 0 3, Jug n 1, Jug r 2, Amb a 1, Bet v 1-A, Can f 1, |
| | Cyn d 1, Der F 1 (19-321), Der F 1 (99-321), Der P2, Der F 2, DerP1 (del), Fel d 1, Fel d 2, Fel d 4, |
| | Lit v 1, Lol p 5a, Phl p 1, Phl p 5, Der f 15, Der f 18, Zen-1, Cte f 1, Api m1, Api m2, |
| | Api m3, Api m5, Api m10, Ves v1, Ves v2, Ves v3, Ves v5, Pol d1, Pol d5, Ara H1, Ara H2, Ara H3, Cry J1, |
| | Cry J2, Cry J3, CJP-4, CJP-6, CJP-8, CPA63, CJP38, Cha o 1, Jun a 1, Jun v 1, Cup a 1, Jun o 1, Cup s 1, |
| | Cha o 2, Jun a 2, Cup a 2, Jun a 3, Jun r 3, Cup s 3, Cup a 3, Ch4-1, PT-1, LTP, Ara H 6, Ara H 8, |
| | and/or Ara H 9 |
| Ch4-1 | Cor a 1, Cor a 9, Pru du 6, Ana 0 1, Ana 0 2, Ana 0 3, Jug n 1, Jug r 2, Amb a 1, Bet v 1-A, Can f 1, |
| | Cyn d 1, Der F 1 (19-321), Der F 1 (99-321), Der P2, Der F 2, DerP1 (del), Fel d 1, Fel d 2, Fel d 4, |
| | Lit v 1, Lol p 5a, Phl p 1, Phl p 5, Der f 15, Der f 18, Zen-1, Cte f 1, Api m1, Api m2, |
| | Api m3, Api m5, Api m10, Ves v1, Ves v2, Ves v3, Ves v5, Pol d1, Pol d5, Ara H1, Ara H2, Ara H3, Cry J1, |
| | Cry J2, Cry J3, CJP-4, CJP-6, CJP-8, CPA63, CJP38, Cha o 1, Jun a 1, Jun v 1, Cup a 1, Jun o 1, Cup s 1, |
| | Cha o 2, Jun a 2, Cup a 2, Jun a 3, Jun r 3, Cup s 3, Cup a 3, Ch4A, PT-1, LTP, Ara H 6, Ara H 8, |
| | and/or Ara H 9 |
| PT-1 | Cor a 1, Cor a 9, Pru du 6, Ana 0 1, Ana 0 2, Ana 0 3, Jug n 1, Jug r 2, Amb a 1, Bet v 1-A, Can f 1, |
| | Cyn d 1, Der F 1 (19-321), Der F 1 (99-321), Der P2, Der F 2, DerP1 (del), Fel d 1, Fel d 2, |
| | Fel d 4, Lit v 1, Lol p 5a, Phl p 1, Phl p 5, Der f 15, Der f 18, Zen-1, Cte f 1, Api m1, Api m2, |
| | Api m3, Api m5, Api m10, Ves v1, Ves v2, Ves v3, Ves v5, Pol d1, Pol d5, Ara H1, Ara H2, Ara H3, Cry J1, |
| | Cry J2, Cry J3, CJP-4, CJP-6, CJP-8, CPA63, CJP38, Cha o 1, Jun a 1, Jun v 1, Cup a 1, Jun o 1, |
| | Cup s 1, Cha o 2, Jun a 2, Cup a 2, Jun a 3, Jun r 3, Cup s 3, Cup a 3, Ch4A, Ch4-1, LTP, Ara H 6, |
| | Ara H 8, and/or Ara H 9 |
| LTP | Cora 1, Cora 9, Pru du 6, Ana 0 1, Ana 0 2, Ana 0 3, Jugn 1, Jug r 2, Amb a 1, Bet v 1-A, Can f 1, |
| | Cyn d 1, Der F 1 (19-321), Der F 1 (99-321), Der P2, Der F 2, DerP1 (del), Fel d 1, Fel d 2, Fel d 4, |
| | Lit v 1, Lol p 5a, Phl p 1, Phl p 5, Der f 15, Der f 18, Zen-1, Cte f 1, Api m1, Api m2, |
| | Api m3, Api m5, Api m10, Ves v1, Ves v2, Ves v3, Ves v5, Pol d1, Pol d5, Ara H1, Ara H2, Ara H3, Cry J1, |
| | Cry J2, Cry J3, CJP-4, CJP-6, CJP-8, CPA63, CJP38, Cha o 1, Jun a 1, Jun v 1, Cup a 1, Jun o 1, Cup s 1, |
| | Cha o 2, Jun a 2, Cup a 2, Jun a 3, Jun r 3, Cup s 3, Cup a 3, Ch4A, Ch4-1, PT-1, Ara H 6, Ara H 8, |
| | and/or Ara H 9 |
| Ara H 6 | Cor a 1, Cor a 9, Pru du 6, Ana 0 1, Ana 0 2, Ana 0 3, Jug n 1, Jug r 2, Amb a 1, Bet v 1-A, Can f 1, |
| | Cyn d 1, Der F 1 (19-321), Der F 1 (99-321), Der P2, Der F 2, DerP1 (del), Fel d 1, Fel d 2, Fel d 4, |
| | Lit v 1, Lol p 5a, Phl p 1, Phl p 5, Der f 15, Der f 18, Zen-1, Cte f 1, Api m1, Api m2, Api m3, |
| | Api m5, Api m10, Ves v1, Ves v2, Ves v3, Ves v5, Pol d1, Pol d5, Ara H1, Ara H2, Ara H3, Cry J1, |
| | Cry J2, Cry J3, CJP-4, CJP-6, CJP-8, CPA63, CJP38, Cha o 1, Jun a 1, Jun v 1, Cup a 1, Jun o 1, |
| | Cup s 1, Cha o 2, Jun a 2, Cup a 2, Jun a 3, Jun r 3, Cup s 3, Cup a 3, Ch4A, Ch4-1, PT-1, LTP, |
| | Ara H 8, and/or Ara H 9 |
| Ara H 8 | Cor a 1, Cor a 9, Pru du 6, Ana 0 1, Ana 0 2, Ana 0 3, Jug n 1, Jug r 2, Amb a 1, Bet v 1-A, Can f 1, |
| | Cyn d 1, Der F 1 (19-321), Der F 1 (99-321), Der P2, Der F 2, DerP1 (del), Fel d 1, Fel d 2, Fel d 4, |
| | Lit v 1, Lol p 5a, Phl p 1, Phl p 5, Der f 15, Der f 18, Zen-1, Cte f 1, Api m1, Api m2, |
| | Api m3, Api m5, Api m10, Ves v1, Ves v2, Ves v3, Ves v5, Pol d1, Pol d5, Ara H1, Ara H2, Ara H3, Cry J1, |
| | Cry J2, Cry J3, CJP-4, CJP-6, CJP-8, CPA63, CJP38, Cha o 1, Jun a 1, Jun v 1, Cup a 1, Jun o 1, |
| | Cup s 1, Cha o 2, Jun a 2, Cup a 2, Jun a 3, Jun r 3, Cup s 3, Cup a 3, Ch4A, Ch4-1, PT-1, LTP, |
| | Ara H 6, and/or Ara H 9 |
| Ara H 9 | Cor a 1, Cor a 9, Pru du 6, Ana 0 1, Ana 0 2, Ana 0 3, Jug n 1, Jug r 2, Amb a 1, Bet v 1-A, Can f 1, |
| | Cyn d 1, Der F 1 (19-321), Der F 1 (99-321), Der P2, Der F 2, DerP1 (del), Fel d 1, Fel d 2, Fel d 4, |
| | Lit v 1, Lol p 5a, Phl p 1, Phl p 5, Der f 15, Der f 18, Zen-1, Cte f 1, Api m1, Api m2, |
| | Api m3, Api m5, Api m10, Ves v1, Ves v2, Ves v3, Ves v5, Pol d1, Pol d5, Ara H1, Ara H2, Ara H3, Cry J1, |
| | Cry J2, Cry J3, CJP-4, CJP-6, CJP-8, CPA63, CJP38, Cha o 1, Jun a 1, Jun v 1, Cup a 1, Jun o 1, |
| | Cup s 1, Cha o 2, Jun a 2, Cup a 2, Jun a 3, Jun r 3, Cup s 3, Cup a 3, Ch4A, Ch4-1, PT-1, |
| | LTP, Ara H 6, and/or Ara H 8 |

### Assembly of Sequences Encoding Improved LAMP Constructs

[0138] Procedures for constructing improved LAMP Constructs comprising the allergen of interest are well known in the art (see e.g., Williams, et al., J. Cell Biol. 111: 955, 1990). DNA sequences encoding the desired segments can be obtained from readily available recombinant DNA materials such as those available from the American Type Culture Collection, 12301 Parklawn Drive, Rockville, Md. 20852, U.S.A., or from DNA libraries that contain the desired DNA.

[0139] For example, the DNA segments corresponding to the desired domain sequences can be assembled with appropriate control and signal sequences using routine procedures of recombinant DNA methodology. See, e.g., as described in U.S. Pat. No. 4,593,002, and Langford, et al., Molec. Cell. Biol. 6: 3191, 1986.

[0140] A DNA sequence encoding a protein or polypeptide can be synthesized chemically or isolated by one of several approaches. The DNA sequence to be synthesized can be designed with the appropriate codons for the desired amino acid sequence. In general, one will select preferred codons for the intended host in which the sequence will be used for expression. The complete sequence may be assembled from overlapping oligonucleotides prepared by standard methods and assembled into a complete coding sequence. See, e.g., Edge, Nature 292: 756, 1981; Nambair, et al. Science 223: 1299, 1984; Jay, et al., J. Biol. Chem. 259: 6311, 1984.

[0141] In one aspect, one or more of the nucleic acids encoding the domain sequences of the improved LAMP Construct are isolated individually using the polymerase chain reaction (M. A. Innis, et al., In PCR Protocols: A Guide to Methods and Applications, Academic Press, 1990). The domains are preferably isolated from publicly available clones known to contain them, but they may also be isolated from genomic DNA or cDNA libraries. Preferably, isolated fragments are bordered by compatible restriction endonuclease sites which allow an improved LAMP Construct encoding the allergen sequence to be constructed. This technique is well known to those of skill in the art. Domain sequences may be fused directly to each other (e.g., with no intervening sequences), or inserted into one another (e.g., where domain sequences are discontinuous), or may be separated by intervening sequences (e.g., such as linker sequences).

[0142] The basic strategies for preparing oligonucleotide primers, probes and DNA libraries, as well as their screening by nucleic acid hybridization, are well known to those of ordinary skill in the art. See, e.g., Sambrook, et al., 1989, supra; Perbal, 1984, supra. The construction of an appropriate genomic DNA or cDNA library is within the skill of the art. See, e.g., Perbal, 1984, supra. Alternatively, suitable DNA libraries or publicly available clones are available from suppliers of biological research materials, such as Clontech and Stratagene, as well as from public depositories such as the American Type Culture Collection.

[0143] Selection may be accomplished by expressing sequences from an expression library of DNA and detecting the expressed peptides immunologically. Clones which express peptides that bind to MHC II molecules and to the desired antibodies/T cell receptors are selected. These selection procedures are well known to those of ordinary skill in the art (see, e.g., Sambrook, et al., 1989, supra).

[0144] Once a clone containing the coding sequence for the desired polypeptide sequence has been prepared or isolated, the sequence can be cloned into any suitable vector, preferably comprising an origin of replication for maintaining the sequence in a host cell.

### Nucleic Acid Delivery Vehicles

[0145] In one aspect, a vaccine composition comprising an improved LAMP Construct is introduced into a cell. The cell may be a host cell for replicating the nucleic acid or for expressing the improved LAMP Construct. Preferably, the host cell for expressing the improved LAMP Construct is an antigen presenting cell (described further below).

[0146] In preferred embodiments, the improved LAMP Construct further comprises a polynucleotide sequence for insertion into a target cell and an expression control sequence operably linked thereto to control expression of the polynucleotide sequence (e.g., transcription and/or translation) in the cell. Examples include plasmids, phages, autonomously replicating sequences (ARS), centromeres, and other sequences which are able to replicate or be replicated in vitro or in a host cell (e.g., such as a bacterial, yeast, or insect cell) and/or target cell (e.g., such as a mammalian cell, preferably an antigen presenting cell) and/or to convey the sequences encoding the improved LAMP Construct to a desired location within the target cell.

[0147] Recombinant expression vectors may be derived from micro-organisms which readily infect animals, including man, horses, cows, pigs, llamas, giraffes, dogs, cats or chickens. Preferred vectors include those which have already been used as live vaccines, such as vaccinia. These recombinants can be directly inoculated into a host, conferring immunity not only to the microbial vector, but also to express foreign allergens. Preferred vectors contemplated herein as live recombinant vaccines include RNA viruses, adenovirus, herpesviruses, poliovirus, and vaccinia and other pox viruses, as taught in Flexner, Adv. Pharmacol. 21:51, 1990, for example.

[0148] Expression control sequences include, but are not limited to, promoter sequences to bind RNA polymerase, enhancer sequences or negative regulatory elements to bind to transcriptional activators and repressors, respectively, and/or translation initiation sequences for ribosome binding. For example, a bacterial expression vector can include a promoter such as the lac promoter and for transcription initiation, the Shine-Dalgarno sequence and the start codon AUG (Sambrook, et al., 1989, supra). Similarly, a eukaryotic expression vector preferably includes a heterologous, homologous, or chimeric promoter for RNA polymerase II, a downstream polyadenylation signal, the start codon AUG, and a termination codon for detachment of a ribosome.

[0149] Expression control sequences may be obtained from naturally occurring genes or may be designed. Designed expression control sequences include, but are not limited to, mutated and/or chimeric expression control sequences or synthetic or cloned consensus sequences. Vectors that contain both a promoter and a cloning site into which a polynucleotide can be operatively linked are well known in the art. Such vectors are capable of transcribing RNA in vitro or in vivo, and are commercially available from sources such as Stratagene (La Jolla, Calif.) and Promega Biotech (Madison, Wis.).

[0150] In order to optimize expression and/or transcription, it may be necessary to remove, add or alter 5′ and/or 3′ untranslated portions of the vectors to eliminate extra, or alternative translation initiation codons or other sequences that may interfere with, or reduce, expression, either at the level of transcription or translation. Alternatively, consensus ribosome binding sites can be inserted immediately 5′ of the start codon to enhance expression. A wide variety of expression control sequences--sequences that control the expression of a DNA sequence operatively linked to it—may be used in these vectors to express the DNA sequences of this invention. Such useful expression control sequences include, for example, the early or late promoters of SV40, CMV, vaccinia, polyoma, adenovirus, herpes virus and other sequences known to control the expression of genes of mammalian cells, and various combinations thereof.

[0151] In one aspect, the improved LAMP Construct comprises an origin of replication for replicating the vector. Preferably, the origin functions in at least one type of host cell which can be used to generate sufficient numbers of copies of the sequence for use in delivery to a target cell. Suitable origins therefore include, but are not limited to, those which function in bacterial cells (e.g., such as Escherichia sp., Salmonella sp., Proteus sp., Clostridium sp., Klebsiella sp., Bacillus sp., Streptomyces sp., and Pseudomonas sp.), yeast (e.g., such as Saccharamyces sp. or Pichia sp.), insect cells, and mammalian cells. In one preferred aspect, an origin of replication is provided which functions in the target cell into which the nucleic acid delivery vehicle is introduced (e.g., a mammalian cell, such as a human cell). In another aspect, at least two origins of replication are provided, one that functions in a host cell and one that functions in a target cell.

[0152] The improved LAMP Construct may alternatively, or additionally, comprise sequences to facilitate integration of at least a portion of the nucleic acid deliver vector into a target cell chromosome. For example, the improved LAMP Construct may comprise regions of homology to target cell chromosomal DNA. In one aspect, the delivery vector comprises two or more recombination sites which flank a nucleic acid sequence encoding the improved LAMP Construct.

[0153] The vector may additionally comprise a detectable and/or selectable marker to verify that the vector has been successfully introduced in a target cell and/or can be expressed by the target cell. These markers can encode an activity, such as, but not limited to, production of RNA, peptide, or protein, or can provide a binding site for RNA, peptides, proteins, inorganic and organic compounds or compositions and the like.

[0154] Examples of detectable/selectable markers genes include, but are not limited to: DNA segments that encode products which provide resistance against otherwise toxic compounds (e.g., antibiotics); DNA segments that encode products which are otherwise lacking in the recipient cell (e.g., tRNA genes, auxotrophic markers); DNA segments that encode products which suppress the activity of a gene product; DNA segments that encode products which can be readily identified (e.g., phenotypic markers such as beta-galactosidase, a fluorescent protein (GFP, CFP, YFG, BFP, RFP, EGFP, EYFP, EBFP, dsRed, mutated, modified, or enhanced forms thereof, and the like), and cell surface proteins); DNA segments that bind products which are otherwise detrimental to cell survival and/or function; DNA segments that otherwise inhibit the activity of other nucleic acid segments (e.g., antisense oligonucleotides); DNA segments that bind products that modify a substrate (e.g., restriction endonucleases); DNA segments that can be used to isolate or identify a desired molecule (e.g., segments encoding specific protein binding sites); primer sequences; DNA segments, which when absent, directly or indirectly confer resistance or sensitivity to particular compounds; and/or DNA segments that encode products which are toxic in recipient cells.

[0155] The marker gene can be used as a marker for conformation of successful gene transfer and/or to isolate cells expressing transferred genes and/or to recover transferred genes from a cell. For example, in one aspect, the marker gene is used to isolate and purify antigen presenting cells expressing the improved LAMP Constructs.

[0156] Substantially similar genes may be provided, e.g., genes with greater than about 50%, greater than about 70%, greater than 80%, greater than about 90%, and preferably, greater than about 95% identity to a known gene. Substantially similar domain sequences may initially be identified by selecting a sequence which specifically hybridizes to a domain sequence of interest under stringent hybridization conditions. Performing assays to determine the suitability of homologous, variant, or modified domain sequences is merely a matter of screening for sequences which express the appropriate activity. Such screening is routine in the art.

[0157] The improved LAMP Construct may be provided as naked nucleic acids or in a delivery vehicle associated with one or more molecules for facilitating entry of a nucleic acid into a cell. Suitable delivery vehicles include, but are not limited to: liposomal formulations, polypeptides, polysaccharides, lipopolysaccharides, viral formulations (e.g., including viruses, viral particles, artificial viral envelopes and the like), cell delivery vehicles, and the like.

### Lipid-Based Formulations

[0158] Delivery vehicles designed to facilitate intracellular delivery of the improved LAMP Constructs must interact with both non-polar and polar environments (in or on, for example, the plasma membrane, tissue fluids, compartments within the cell, and the like). Therefore, preferably, delivery vehicles are designed to contain both polar and non-polar domains or a translocating sequence for translocating an improved LAMP Construct into a cell.

[0159] Compounds having polar and non-polar domains are termed amphiphiles. Cationic amphiphiles have polar groups that are capable of being positively charged at, or around, physiological pH for interacting with negatively charged polynucleotides such as DNA.

[0160] The improved LAMP Constructs described herein can be provided in formulations comprising lipid monolayers or bilayers to facilitate transfer of the vectors across a cell membrane. Liposomes or any form of lipid membrane, such as planar lipid membranes or the cell membrane of an intact cell, e.g., a red blood cell, can be used. Liposomal formulations can be administered by any means, including administration intravenously or orally.

[0161] Liposomes and liposomal formulations can be prepared according to standard methods and are well known in the art, see, e.g., Remington's; Akimaru, 1995, Cytokines Mol. Ther. 1: 197-210; Alving, 1995, Immunol. Rev. 145: 5-31; Szoka, 1980, Ann. Rev. Biophys. Bioeng. 9: 467; U.S. Pat. No. 4,235,871; U.S. Pat. No. 4,501,728; and U.S. Pat. No. 4,837,028. In one aspect, the liposome comprises a targeting molecule for targeting a liposome:improved LAMP Construct complex to a particular cell type. In a particularly preferred aspect, a targeting molecule comprises a binding partner (e.g., a ligand or receptor) for a biomolecule (e.g., a receptor or ligand) on the surface of a blood vessel or a cell found in a target tissue.

[0162] Liposome charge is an important determinant in liposome clearance from the blood, with negatively charged liposomes being taken up more rapidly by the reticuloendothelial system (Juliano, 1975, Biochem. Biophys. Res. Commun. 63: 651) and thus having shorter half-lives in the bloodstream. Incorporating phosphatidylethanolamine derivatives enhances the circulation time by preventing liposomal aggregation. For example, incorporation of N-(omega-carboxy)acylamidophosphatidylethanolamines into large unilamellar vesicles of L-alpha-distearoylphosphatidylcholine dramatically increases the in vivo liposomal circulation lifetime (see, e.g., Ahl, 1997, Biochim. Biophys. Acta 1329: 370-382). Liposomes with prolonged circulation half-lives are typically desirable for therapeutic and diagnostic uses. For a general discussion of pharmacokinetics, see, e.g., Remington's, Chapters 37-39, Lee, et al., In Pharmacokinetic Analysis: A Practical Approach (Technomic Publishing AG, Basel, Switzerland 1996).

[0163] Typically, liposomes are prepared with about 5 to 15 mole percent negatively charged phospholipids, such as phosphatidylglycerol, phosphatidylserine or phosphatidyl-inositol. Added negatively charged phospholipids, such as phosphatidylglycerol, also serve to prevent spontaneous liposome aggregation, and thus minimize the risk of undersized liposomal aggregate formation. Membrane-rigidifying agents, such as sphingomyelin or a saturated neutral phospholipid, at a concentration of at least about 50 mole percent, and 5 to 15 mole percent of monosialylganglioside can also impart desirably liposome properties, such as rigidity (see, e.g., U.S. Pat. No. 4,837,028).

[0164] Additionally, the liposome suspension can include lipid-protective agents which protect lipids against free-radical and lipid-peroxidative damages on storage. Lipophilic free-radical quenchers, such as alpha-tocopherol and water-soluble iron-specific chelators, such as ferrioxianine, are preferred.

[0165] The improved LAMP Constructs of the invention can include multilamellar vesicles of heterogeneous sizes. For example, vesicle-forming lipids can be dissolved in a suitable organic solvent or solvent system and dried under vacuum or an inert gas to form a thin lipid film. If desired, the film can be redissolved in a suitable solvent, such as tertiary butanol, and then lyophilized to form a more homogeneous lipid mixture which is in a more easily hydrated powderlike form. This film is covered with an aqueous solution of the peptide or polypeptide complex and allowed to hydrate, typically over a 15 to 60 minute period with agitation. The size distribution of the resulting multilamellar vesicles can be shifted toward smaller sizes by hydrating the lipids under more vigorous agitation conditions or by adding solubilizing detergents such as deoxycholate. The hydration medium preferably comprises the nucleic acid at a concentration which is desired in the interior volume of the liposomes in the final liposome suspension.

[0166] Following liposome preparation, the liposomes can be sized to achieve a desired size range and relatively narrow distribution of liposome sizes. One preferred size range is about 0.2 to 0.4 microns, which allows the liposome suspension to be sterilized by filtration through a conventional filter, typically a 0.22 micron filter. Filter sterilization can be carried out on a high throughput basis if the liposomes have been sized down to about 0.2 to 0.4 microns. Several techniques are available for sizing liposome to a desired size (see, e.g., U.S. Pat. No. 4,737,323).

[0167] Suitable lipids include, but are not limited to, DOTMA (Feigner, et al., 1987, Proc. Natl. Acad. Sci. USA 84: 7413-7417), DOGS or Transfectain™ (Behr, et al., 1989, Proc. Natl. Acad. Sci. USA 86: 6982-6986), DNERIE or DORIE (Feigner, et al., Methods 5: 67-75), DC-CHOL (Gao and Huang, 1991, BBRC 179: 280-285), DOTAP™ (McLachlan, et al., 1995, Gene Therapy 2: 674-622), Lipofectamine^{TM}. and glycerolipid compounds (see, e.g., EP901463 and WO98/37916).

[0168] Other molecules suitable for complexing with the improved LAMP Constructs include cationic molecules, such as, polyamidoamine (Haensler and Szoka, 1993, Bioconjugate Chem. 4: 372-379), dendritic polysine (WO 95/24221), polyethylene irinine or polypropylene h-nine (WO 96/02655), polylysine (U.S. Pat. No. 5,595,897; FR 2 719 316), chitosan (U.S. Pat. No. 5,744,166), DNA-gelatin coarcervates (see, e.g., U.S. Pat. No. 6,207,195; U.S. Pat. No. 6,025,337; U.S. Pat. No. 5,972,707) or DEAE dextran (Lopata, et al., 1984, Nucleic Acid Res. 12: 5707-5717).

### Viral-Based Gene Delivery Vehicles

[0169] In one aspect, the improved LAMP Construct delivery vehicle comprises a virus or viral particle. In this aspect, preferably, the improved LAMP Construct comprises a viral vector. Viral vectors, such as retroviruses, adenoviruses, adeno-associated viruses and herpes viruses, are often made up of two components, a modified viral genome and a coat structure surrounding it (see, e.g., Smith et al., 1995, Ann. Rev. Microbiol. 49: 807-838), although sometimes viral vectors are introduced in naked form or coated with proteins other than viral proteins. Most current vectors have coat structures similar to a wild-type virus. This structure packages and protects the viral nucleic acid and provides the means to bind and enter target cells.

[0170] Preferably, viral vectors comprising the improved LAMP Constructs described herein are modified from wild-type viral genomes to disable the growth of the virus in a target cell while enabling the virus to grow in a host cell (e.g., such as a packaging or helper cell) used to prepare infectious particles. Vector nucleic acids generally essential cis-acting viral sequences for replication and packaging in a helper line and expression control sequences for regulating the expression of a polynucleotide being delivered to a target cell. Other viral functions are expressed in trans in specific packaging or helper cell lines as are known in the art.

[0171] Preferred improved LAMP Constructs are viral vectors derived from a virus selected from the group consisting of herpes viruses, cytomegaloviruses, foamy viruses, lentiviruses, Semliki forrest virus, AAV (adeno-associated virus), poxviruses, adenovirases and retroviruses. Such viral vectors are well known in the art.

[0172] In one preferred aspect, a viral vector used is an adenoviral vector. The adenoviral genome consists of a linear double-stranded DNA molecule of approximately 36 kb carrying more than about thirty genes necessary to complete the viral replication cycle. The early genes are divided into 4 regions (E1 to E4) that are essential for viral replication with the exception of the E3 region, which is believed to modulate the anti-viral host immune response. The E1 region (EIA and EIB) encodes proteins responsible for the regulation of transcription of the viral genome. Expression of the E2 region genes (E2A and E2B) leads to the synthesis of the polypeptides needed for viral replication. The proteins encoded by the E3 region prevent cytolysis by cytotoxic T cells and tumor necrosis factor (Wold and Gooding, 1991, Virology 184: 1-8). The proteins encoded by the E4 region are involved in DNA replication, late gene expression and splicing and host cell shut off (Halbert, et al., 1985, J. Virol. 56: 250-257). The late genes generally encode structural proteins contributing to the viral capsid. In addition, the adenoviral genome carries at cis-acting 5′ and 3′ ITRs (Inverted Terminal Repeat) and packaging sequences essential for DNA replication. The ITRs harbor origins of DNA replication while the encapsidation region is required for the packaging of adenoviral DNA into infectious particles.

[0173] Adenoviral vectors can be engineered to be conditionally replicative (CRAd vectors) in order to replicate selectively in specific cells (e.g., such as proliferative cells) as described in Heise and Kim (2000, J. Clin. Invest. 105: 847-85 1). In another aspect, an adenoviral vector is replication-defective for the El function (e.g., by total or partial deletion or mutagenesis of E 1). The adenoviral backbone of the vector may comprise additional modifications (deletions, insertions or mutations in one or more viral genes). An example of an E2 modification is illustrated by the thermosensitive mutation localized on the DBP (DNA Binding Protein) encoding gene (Ensinger et al., 1972, J. Virol. 10: 328-339). The adenoviral sequence may also be deleted of all or part of the E4 region (see, e.g., EP 974 668; Christ, et al., 2000, Human Gene Ther. 11: 415-427; Lusky, et al., 1999, J. Virol. 73: 8308-8319). Additional deletions within the non-essential E3 region may allow the size of the polynucleotide being delivered to be increased (Yeh, et al., 1997, FASEB Journal 11: 615 623). However, it may be advantageous to retain all or part of the E3 sequences coding for polypeptides (e.g., such as gp19k) allowing the virus to escape the immune system (Gooding, et al., 1990, Critical Review of Immunology 10: 53-71) or inflammatory reactions (EP 00440267.3).

[0174] Second generation vectors retaining the ITRs and packaging sequences and comprising substantial genetic modifications to abolish the residual synthesis of the viral antigens also may be used in order to improve long-term expression of the expressed gene in the transduced cells (see, e.g., WO 94/28152; Lusky, et al., 1998, J. Virol 72: 2022-2032).

[0175] The improved LAMP Constructs being introduced into the cell may be inserted in any location of the viral genome, with the exception of the cis-acting sequences. Preferably, it is inserted in replacement of a deleted region (E1, E3 and/or E4), preferably, within a deleted E1 region.

[0176] Adenoviruses can be derived from any human or animal source, in particular canine (e.g. CAV-1 or CAV-2 Genbank ref. CAVIGENOM and CAV77082, respectively), avian (Genbank ref. AAVEDSDNA), bovine (such as BAV3; Reddy, et al., 1998, J. Virol. 72: 1394 1402), murine (Genbank ref. ADRMUSMAVI), ovine, feline, porcine or simian sources or alternatively, may be a hybrid virus. Any serotype can be employed. However, the human adenoviruses of the C sub-group are preferred, especially adenoviruses 2 (Ad2) and 5 (Ad5). Such viruses are available, for example, from the ATCC.

[0177] Adenoviral particles or empty adenoviral capsids also can be used to transfer improved LAMP Constructs by a virus-mediated cointernalization process as described in U.S. Pat. No. 5,928,944. This process can be accomplished in the presence of cationic agent(s) such as polycarbenes or lipid vesicles comprising one or more lipid layers.

[0178] Adenoviral particles may be prepared and propagated according to any conventional technique in the field of the art (e.g., WO 96/17070) using a complementation cell line or a helper virus, which supplies in trans the missing viral genes necessary for viral replication. The cell lines 293 (Graham et al., 1977, J. Gen. Virol. 36: 59-72) and PERC6 (Fallaux et al., 1998, Human Gene Therapy 9: 1909-1917) are commonly used to complement E1 deletions. Other cell lines have been engineered to complement defective vectors (Yeh, et al., 1996, J. Virol. 70: 559-565; Kroughak and Graham, 1995, Human Gene Ther. 6: 1575-1586; Wang, et al., 1995, Gene Ther. 2: 775-783; Lusky, et al., 1998, J. Virol. 72: 2022-203; EP 919627 and WO 97/04119). The adenoviral particles can be recovered from the culture supernatant but also from the cells after lysis and optionally further purified according to standard techniques (e.g., chromatography, ultracentrifugation, as described in WO 96/27677, WO 98/00524 WO 98/26048 and WO 00/50573).

[0179] Cell-type specific targeting may be achieved with vectors derived from adenoviruses having a broad host range by the modification of viral surface proteins. For example, the specificity of infection of adenoviruses is determined by the attachment to cellular receptors present at the surface of permissive cells. In this regard, the fiber and penton present at the surface of the adenoviral capsid play a critical role in cellular attachment (Defer, et al., 1990, J. Virol. 64: 3661-3673). Thus, cell targeting of adenoviruses can be carried out by genetic modification of the viral gene encoding fiber and/or penton, to generate modified fiber and/or penton capable of specific interaction with unique cell surface receptors. Examples of such modifications are described in Wickarn, et al., 1997, J. Virol. 71: 8221-8229; Arriberg, et al., 1997, Virol. Chem 268: 6866-6869; Roux, et al., 1989, Proc. Natl. Acad. Sci. USA 86: 9079-9083; Miller and Vile, 1995, FASEB J. 9: 190-199; WO 93/09221, and in WO 95/28494.

[0180] In a particularly preferred aspect, adeno-associated viral sequences are used as vectors. Vectors derived from the human parvovirus AAV-2 (adeno-associated virus type 2) are among the most promising gene delivery vehicles currently being developed. Several of the features of this system for packaging a single-stranded DNA suggest it as a possible alternative to naked DNA for delivery. A primary attractive feature, in contrast to other viral vectors such as vaccinia or adenovirus, is that AAV vectors do not express any viral genes. The only viral DNA sequences included in the vaccine construct are the 145 bp inverted terminal repeats (ITR). Thus, as in immunization with naked DNA, the only gene expressed is that of the allergen, or allergen chimera. Additionally, AAV vectors are known to transduce both dividing and non-dividing cells, such as human peripheral blood monocyte-derived dendritic cells, with persistent transgene expression, and with the possibility of oral and intranasal delivery for generation of mucosal immunity. Moreover, the amount of DNA required appears to be much less by several orders of magnitude, with maximum responses at doses of 10¹⁰ to 10¹¹ particles or copies of DNA in contrast to naked DNA doses of 50 ug or about 10¹⁵ copies.

[0181] In one aspect, AAV vectors are packaged by co-transfection of a suitable cell line (e.g., human 293 cells) with the DNA contained in the AAV ITR chimeric protein encoding constructs and an AAV helper plasmid ACG2 containing the AAV coding region (AAV rep and cap genes) without the ITRs. The cells are subsequently infected with the adenovirus AdS. Vectors can be purified from cell lysates using methods known in the art (e.g., such as cesium chloride density gradient ultracentrifugation) and are validated to ensure that they are free of detectable replication-competent AAV or adenovirus (e.g., by a cytopathic effect bioassay). AAV titer may be determined by quantitative PCR with virus DNA samples prepared after digestion with proteinase K. Preferably, vector titers produced by such a method are approximately 5×10¹² to 1×10¹³ DNase resistant particles per ml.

[0182] In other aspects, retroviral vectors are used. Retroviruses are a class of integrative viruses which replicate using a virus-encoded reverse transcriptase, to replicate the viral RNA genome into double stranded DNA which is integrated into chromosomal DNA of the infected cells (e.g., target cells). Such vectors include those derived from murine leukemia viruses, especially Moloney (Gilboa, et al., 1988, Adv. Exp. Med. Biol. 241: 29) or Friend's FB29 strains (WO 95/01447). Generally, a retroviral vector is deleted of all or part of the viral genes gag, pol and env and retains 5′ and 3′ LTRs and an encapsidation sequence. These elements may be modified to increase expression level or stability of the retroviral vector. Such modifications include the replacement of the retroviral encapsidation sequence by one of a retrotransposon such as VL30 (see, e.g., U.S. Pat. No. 5,747,323). Preferably, the improved LAMP Construct is inserted downstream of the encapsidation sequence, preferably in opposite direction relative to the retroviral genome. Cell specific targeting may be achieved by the conjugation of antibodies or antibody fragments to the retroviral envelope protein as is known in the art.

[0183] Retroviral particles are prepared in the presence of a helper virus or in an appropriate complementation (packaging) cell line which contains integrated into its genome the retroviral genes for which the retroviral vector is defective (e.g. gag/pol and env). Such cell lines are described in the prior art (Miller and Rosman, 1989, BioTechniques 7:980; Danos and Mulligan, 1988, Proc. Natl. Acad. Sci. USA 85: 6460; Markowitz, et al., 1988, Virol. 167: 400). The product of the env gene is responsible for the binding of the viral particle to the viral receptors present on the surface of the target cell and, therefore determines the host range of the retroviral particle. in the context of the invention, it is advantageous to use a packaging cell line, such as the PA317 cells (ATCC CRL 9078) or 293E16 (W097/35996) containing an amphotropic envelope protein, to allow infection of human and other species' target cells. The retroviral particles are preferably recovered from the culture supernatant and may optionally be further purified according to standard techniques (e.g. chromatography, ultracentrifugation).

[0184] Other suitable viruses include poxviruses. The genome of several members of poxyiridae has been mapped and sequenced. A poxyiral vector may be obtained from any member of the poxyiridae, in particular canarypox, fowlpox and vaccinia virus. Suitable vaccinia viruses include, but are not limited to, the Copenhagen strain (Goebel, et al., 1990, Virol. 179: 247-266; Johnson, et al., 1993, Virol. 196: 381-401), the Wyeth strain and the modified Ankara (MVA) strain (Antoine, et at., 1998, Virol. 244: 365-396). The general conditions for constructing a vaccinia virus vector are known in the art (see, e.g., EP 83 286 and EP 206 920; Mayr et al., 1975, Infection 3: 6-14; Sutter and Moss, 1992, Proc. Natl. Acad. Sci. USA 89: 10847-10851). Preferably, the polynucleotide of interest is inserted within a non-essential locus such as the noncoding intergenic regions or any gene for which inactivation or deletion does not significantly impair viral growth and replication.

[0185] Poxyiral particles are prepared as described in the art (Piccini, et al., 1987, Methods of Enzymology 153: 545-563; U.S. Pat. No. 4,769,330; U.S. Pat. No. 4,772,848; U.S. Pat. No. 4,603,112; U.S. Pat. No. 5,100,587 and U.S. Pat. No. 5,179,993). Generally, a donor plasmid is constructed, amplified by growth in E. coli and isolated by conventional procedures. Then, it is introduced into a suitable cell culture (e.g. chicken embryo fibroblasts) together with a poxvirus genome, to produce, by homologous recombination, poxyiral particles. These can be recovered from the culture supernatant or from the cultured cells after a lysis step (e.g., chemical lysis, freezing/thawing, osmotic shock, sonication and the like). Consecutive rounds of plaque purification can be used to remove contaminating wild type virus. Viral particles can then be purified using the techniques known in the art (e.g., chromatographic methods or ultracentrifugation on cesium chloride or sucrose gradients).

[0186] The use of vaccinia as a live virus vaccine in the global campaign to eradicate smallpox made vaccinia an obvious choice for development as a live recombinant vaccine vector. Live recombinant vaccinia viruses expressing close to 100 different foreign proteins have been reported, and a number of these are effective experimental vaccines (reviewed by Moss and Flexner, 1987). Vaccinia is particularly versatile as an expression vector because of its large genomic size, capability of accepting at least 25,000 base pairs of foreign DNA, and its ability to infect most eukaryotic cell types, including insect cells (ibid.). Unlike other DNA viruses, poxviruses replicate exclusively in the cytoplasm of infected cells, reducing the possibility of genetic exchange of recombinant viral DNA with the host chromosome. Recombinant vaccinia vectors have been shown to properly process and express proteins from a variety of sources including man, other mammals, parasites, RNA and DNA viruses, bacteria and bacteriophage.

[0187] The expression of DNA encoding a foreign protein is controlled by host virus regulatory elements, including upstream promoter sequences and, where necessary, RNA processing signals. Insertion of foreign DNA into nonessential regions of the vaccinia virus genome has been carried out by homologous recombination (Panicali, et al., Proc. Nat'l. Acad. Sci, USA, 79: 4927, 1982; Mackett, et al., Proc. Nat'l. Acad. Sci. USA, 79: 7415, 1982).

[0188] Expression of allergens by the improved LAMP Construct may occur because of transcriptional regulatory elements at or near the site of insertion or by more precise genetic engineering. Plasmid vectors that greatly facilitate insertion and expression of foreign genes have been constructed (Mackett, et al., J. Virol, 49: 857, 1982). These vectors contain an expression site, composed of a vaccinia transcriptional promoter and one or more unique restriction endonuclease sites for insertion of the foreign coding sequence flanked by DNA from a nonessential region of the vaccinia genome. The choice of promoter determines both the time (e.g., early or late) and level of expression, whereas the flanking DNA sequence determines the site of homologous recombination.

[0189] Only about one in a thousand virus particles produced by this procedure is a recombinant. Although recombinant virus plaques can be identified by DNA hybridization, efficient selection procedures have been developed. By using segments of nonessential vaccinia virus thymidine kinase (TK) gene as flanking sequences, the foreign gene recombines into the TK locus and by insertion inactivates the TK gene. Selection of TK virus is achieved by carrying out the virus plaque assay in TK cells in the presents of 5-bromodeoxyuridine. Phosphorylation of the nucleoside analogue and consequent lethal incorporation into viral DNA occurs only in cells infected with TK+parental virus. Depending on the efficiency of the transfection and recombination, up to 80 of the plaques are desired recombinants, and the rest are spontaneous TK mutants.

[0190] Plasmid vectors that contain the E. coli beta-galactosidase gene, as well as an expression site for a second gene, permit an alternative method of distinguishing recombinant from parental virus (Chakrabarti, et al., Mol. Cell. Biol., 5: 3403, 1985). Plaques formed by such recombinants can be positively identified by the blue color that forms upon addition of an appropriate indicator. By combining both TK selection and beta-galactosidase expression, recombinant virus is readily and quickly isolated. The recombinants are then amplified by propagation in suitable cell lines and expression of the inserted gene is checked by appropriate enzymological, immunological or physical procedures.

[0191] An upper limit to the amount of genetic information that can be added to the vaccinia virus genome is not yet known. However, the addition of nearly 25,000 base pairs of foreign DNA had no apparent deleterious effect on virus yield (Smith, et al., Gene, 25:21, 1983). Were it necessary, large segments of the vaccinia virus genome could be deleted to provide additional capacity (Moss, et al., J. Virol. 40: 387, 1981).

[0192] Viral capsid molecules may include targeting moieties to facilitate targeting and/or entry into cells. Suitable targeting molecules, include, but are not limited to: chemical conjugates, lipids, glycolipids, hormones, sugars, polymers (e.g. PEG, polylysine, PEI and the like), peptides, polypeptides (see, e.g., WO 94/40958), vitamins, antigens, lectins, antibodies and fragments thereof. Preferably, such targeting molecules recognize and bind to cell-specific markers, tissue-specific markers, cellular receptors, viral antigens, antigenic epitopes or tumor-associated markers.

[0193] Compositions comprising an improved LAMP Construct based on viral particles may be formulated in the form of doses of between 10 and 10¹⁴ i.u. (infectious units), and preferably, between 10 and 10¹¹ i.u. The titer may be determined by conventional techniques. The doses of LAMP Constructs are preferably comprised between 0.01 and 10 mg/kg, more especially between 0.1 and 2 mg/kg.

### Self-Replicating RNA

[0194] Self-replicating RNA virus vectors can also be constructed using the improved LAMP Constructs as described herein. For example, alphaviruses, flavivuses, measle virus and rhabdoviruses can be used to generate self-replicating RNA virus vaccines. Preferred strains of self-replicating RNA viruses include, but are not limited to rabies virus (RABV), vesicular stomatisitis virus (VSV), West Nile virus, Kunjin virus, Semliki Forest virus (SFV), Sindbis virus (SIN) and/or Venezuelan equine encephalitis virus (VEE).

[0195] Self-replicating RNA viruses express the native antigen upon delivery into tissue, thus mimicking live attenuated vaccines without having the risk of reversion to pathogenicity. They also stimulate the innate immune system, thus potentiating responses. See, e.g., Ljungberg, K. “Self-replicating alphavirus RNA vaccines,” Expert Rev Vaccines (2):177-94 (2015); Lundstrom, K., “Oncolytic Alphaviruses in Cancer Immunotherapy”, Vaccines 5:9 (2017); Lundstrom, K. “Replicon RNA Viral Vectors as Vaccines,” Vaccines 4:39 (2016) (hereby incorporated by reference in their entirety). Use of self-replicating vaccines comprising the improved LAMP Constructs described herein can also be used in prime-boost protocols.

[0196] Moreover, self-replicating RNA viruses can also be encapsulated by liposomes, as described herein, to improve delivery and targeting. Immunization with self-replicating RNA viruses comprising the improved LAMP Constructs described herein may provide higher transient expression levels of allergens resulting in generation of neutralizing antibody responses and protection against lethal challenges under safe conditions.

### Cell-Based Delivery Vehicles

[0197] The improved LAMP Constructs according to the invention can be delivered to target cells by means of other cells (“delivery cells”) which comprise the constructs. Methods for introducing constructs into cells are known in the art and include microinjection of DNA into the nucleus of a cell (Capechi, et al., 1980, Cell 22: 479-488); transfection with CaP0₄ (Chen and Okayama, 1987, Mol. Cell Biol. 7: 2745 2752), electroporation (Chu, et al., 1987, Nucleic Acid Res. 15: 1311-1326); lipofection/liposome fusion (Feigner, et al., 1987, Proc. Natl. Acad. Sci. USA 84: 7413-7417) and particle bombardment (Yang, et al., 1990, Proc. Natl. Acad. Sci. USA 87: 9568-9572). Suitable cells include autologous and non-autologous cells, and may include xenogenic cells. Delivery cells may be induced to deliver their contents to the target cells by inducing their death (e.g., by providing inducible suicide genes to these cells).

### Accessory Molecules

[0198] The compositions comprising the improved LAMP Constructs according to the invention may comprise one or more accessory molecules for facilitating the introduction of an improved LAMP Construct into a cell and/or for enhancing a particular therapeutic effect and/or enhancing antibody production.

[0199] In addition, the composition comprising the improved LAMP Construct according to the present invention may include one or more stabilizing substance(s), such as lipids, nuclease inhibitors, hydrogels, hyaluronidase (WO 98/53853), collagenase, polymers, chelating agents (EP 890362), in order to inhibit degradation within the animal/human body and/or improve transfection/infection of the vector into a target cell. Such substances may be used alone or in combination (e.g., cationic and neutral lipids).

[0200] It has also been shown that adenovirus proteins are capable of destabilizing endosomes and enhancing the uptake of DNA into cells. The mixture of adenoviruses to solutions containing a lipid-complexed DNA vector or the binding of DNA to polylysine covalently attached to adenoviruses using protein cross-linking agents may substantially improve the uptake and expression of an improved LAMP Construct (see, e.g., Curiel, et al., 1992, Am. I. Respir. Cell. Mol. Biol. 6: 247-252).

### Host Cells

[0201] Improved LAMP Constructs according to the invention can be expressed in a variety of host cells, including, but not limited to: prokaryotic cells (e.g., E. coli, Staphylococcus sp., Bacillus sp.); yeast cells (e.g., Saccharomyces sp.); insect cells; nematode cells; plant cells; amphibian cells (e.g., Xenopus); avian cells; and mammalian cells (e.g., human cells, mouse cells, mammalian cell lines, primary cultured mammalian cells, such as from dissected tissues).

[0202] The molecules can be expressed in host cells isolated from an organism, host cells which are part of an organism, or host cells which are introduced into an organism. In one aspect, improved LAMP Constructs are expressed in host cells in vitro, e.g., in culture. In another aspect, improved LAMP Constructs are expressed in a transgenic organism (e.g., a transgenic mouse, rat, rabbit, pig, primate, etc.) that comprises somatic and/or germline cells comprising nucleic acids encoding the improved LAMP Constructs. Methods for constructing transgenic animals are well known in the art and are routine.

[0203] Improved LAMP Constructs also can be introduced into cells in vitro, and the cells (e.g., such as stem cells, hematopoietic cells, lymphocytes, and the like) can be introduced into the host organism. The cells may be heterologous or autologous with respect to the host organism. For example, cells can be obtained from the host organism, improved LAMP Constructs introduced into the cells in vitro, and then reintroduced into the host organism.

### Antigen Presenting Cells

[0204] In a preferred aspect of the invention, an improved LAMP Construct as described herein is introduced into a natural or engineered antigen presenting cell.

[0205] The term “antigen presenting cell” (APC) as used herein intends any cell which presents on its surface an antigen (e.g., an allergen) in association with a major histocompatibility complex molecule, preferably a class II molecule, or portion thereof. Examples of suitable APCs are discussed in detail below and include, but are not limited to, whole cells such as macrophages, dendritic cells, B cells, hybrid APCs, and foster antigen presenting cells. Methods of making hybrid APCs are described and known in the art.

[0206] Dendritic cells (DCs) are potent antigen-presenting cells. It has been shown that DCs provide all the signals required for T cell activation and proliferation. These signals can be categorized into two types. The first type, which gives specificity to the immune response, is mediated through interaction between the T-cell receptor/CD3 (“TCR/CD3”) complex and an allergenic peptide presented by a major histocompatibility complex (“MHC” defined above) class I or II protein on the surface of APCs. This interaction is necessary, but not sufficient, for T cell activation to occur. In fact, without the second type of signals, the first type of signals can result in T cell anergy. The second type of signals, called co-stimulatory signals, is neither antigen-specific nor MHC-restricted, and can lead to a full proliferation response of T cells and induction of T cell effector functions in the presence of the first type of signals.

[0207] Several molecules have been shown to enhance co-stimulatory activity. These include, but are not limited to, heat stable antigen (HSA), chondroitin sulfate-modified MHC invariant chain (Ii-CS), intracellular adhesion molecule I (ICAM-1), and B7 co-stimulatory molecule on the surface of APCs and its counter-receptor CD28 or CTLA-4 on T cells.

[0208] Other important co-stimulatory molecules are CD40, CD54, CD80, CD86. As used herein, the term “co-stimulatory molecule” encompasses any single molecule or combination of molecules which, when acting together with a peptide/MHC complex bound by a TCR on the surface of a T cell, provides a co-stimulatory effect which achieves activation of the T cell that binds the peptide. The term thus encompasses B7, or other co-stimulatory molecule(s) on an APC, fragments thereof (alone, complexed with another molecule(s), or as part of a fusion protein) which, together with peptide/MHC complex, binds to a cognate ligand and result in activation of the T cell when the TCR on the surface of the T cell specifically binds the peptide. Co-stimulatory molecules are commercially available from a variety of sources, including, for example, Beckman Coulter.

[0209] In one aspect of the invention, the method described in Romani et al., J. Immunol. Methods 196: 135-151, 1996, and Bender et al, J. Immunol. Methods 196: 121-135, 1996, are used to generate both immature and mature dendritic cells from the peripheral blood mononuclear cells (PBMCs) of a mammal, such as a murine, simian or human. Briefly, isolated PBMCs are pre-treated to deplete T- and B-cells by means of an immunomagnetic technique. Lymphocyte-depleted PBMC are then cultured for in RPMI medium 9 e.g., about 7 days), supplemented with human plasma (preferably autologous plasma) and GM-CSF/IL-4, to generate dendritic cells. Dendritic cells are nonadherent when compared to their monocyte progenitors. Thus, on approximately day 7, non-adherent cells are harvested for further processing.

[0210] The dendritic cells derived from PBMC in the presence of GM-CSF and IL-4 are immature, in that they can lost the nonadherence property and revert back to macrophage cell fate if the cytokine stimuli are removed from the culture. The dendritic cells in an immature state are very effective in processing native protein antigens for the MHC class II restricted pathway (Romani, et al., J. Exp. Med. 169:1169, 1989). Further maturation of cultured dendritic cells is accomplished by culturing for 3 days in a macrophage-conditioned medium (CM), which contains the necessary maturation factors. Mature dendritic cells are less able to capture new proteins for presentation but are much better at stimulating resting T cells (both CD4 and CD8) to grow and differentiate.

[0211] Mature dendritic cells can be identified by their change in morphology, such as the formation of more motile cytoplasmic processes; by their nonadherence; by the presence of at least one of the following markers: CD83, CD68, HLA-DR or CD86; or by the loss of Fc receptors such as CD 115 (reviewed in Steinman, Annu. Rev. Immunol. 9: 271, 1991). Mature dendritic cells can be collected and analyzed using typical cytofluorography and cell sorting techniques and devices, such as FACScan and FACStar. Primary antibodies used for flow cytometry are those specific to cell surface antigens of mature dendritic cells and are commercially available. Secondary antibodies can be biotinylated Igs followed by FITC- or PE-conjugated streptavidin.

[0212] Alternatively, others have reported that a method for upregulating (activating) dendritic cells and converting monocytes to an activated dendritic cell phenotype. This method involves the addition of calcium ionophore to the culture media convert monocytes into activated dendritic cells. Adding the calcium 21 ionophore A23187, for example, at the beginning of a 24-48 hour culture period resulted in uniform activation and dendritic cell phenotypic conversion of the pooled “monocyte plus DC” fractions: characteristically, the activated population becomes uniformly CD 14 (Leu M3) negative, and upregulates HLA-DR, HLA-DQ, ICAM-1,137.1, and 137.2. Furthermore, this activated bulk population functions as well on a small numbers basis as a further purified. Specific combination(s) of cytokines have been used successfully to amplify (or partially substitute) for the activation/conversion achieved with calcium ionophore: these cytokines include but are not limited to G-CSF, GM-CSF, IL-2, and IL-4. Each cytokine when given alone is inadequate for optimal upregulation.

[0213] The second approach for isolating APCs is to collect the relatively large numbers of precommitted APCs already circulating in the blood. Previous techniques for isolating committed APCs from human peripheral blood have involved combinations of physical procedures such as metrizamide gradients and adherence/nonadherence steps (Freudenthal et al. PNAS 87: 7698-7702, 1990); Percoll gradient separations (Mehta-Damani, et al., J. Immunol. 153: 996-1003, 1994); and fluorescence activated cell sorting techniques (Thomas et al., J. Immunol. 151: 6840-52, 1993).

[0214] There are many other methods routine in the art for isolating professional antigen presenting cells (or their precursors) and that such methods and others which may be developed are not limiting and are encompassed within the scope of the invention.

[0215] In one embodiment, the APCs and therefore the cells presenting one or more allergens as described herein are autologous. In another embodiment, the APCs presenting the allergens as described herein are allogeneic, i.e., derived from a different subject.

[0216] As discussed herein, improved LAMP Constructs can be introduced into APCs using the methods described above or others known in the art, including, but not limited to, transfection, electroporation, fusion, microinjection, viral-based delivery, or cell based delivery. Arthur et al., Cancer Gene Therapy 4(1): 17-25, 1997, reports a comparison of gene transfer methods in human dendritic cells.

[0217] Known, partial and putative human leukocyte antigen (HLA), the genetic designation for the human MHC, amino acid and nucleotide sequences, including the consensus sequence, are published (see, e.g., Zemmour and Parham, Immunogenetics 33: 310-320, 1991), and cell lines expressing HLA variants are known and generally available as well, many from the American Type Culture Collection (“ATCC”). Therefore, using PCR, MHC class II-encoding nucleotide sequences are readily operatively linked to an expression vector of this invention that is then used to transform an appropriate cell for expression therein.

[0218] Professional APCs can be used, such as macrophages, B cells, monocytes, dendritic cells, and Langerhans cells. These are collected from the blood or tissue of 1) an autologous donor; 2) a heterologous donor having a different HLA specificity then the host to be treated; or 3) from a xenogeneic donor of a different species using standard procedures (Coligan, et. al., Current Protocols in Immunology, sections 3 and 14, 1994). The cells may be isolated from a normal host or a patient having an infectious disease, cancer, autoimmune disease, or allergy.

[0219] Professional APCs may be obtained from the peripheral blood using leukopheresis and “FICOLL/HYPAQUE” density gradient centrifugation (stepwise centrifugation through Ficoll and discontinuous Percoll density gradients). Procedures are utilized which avoid the exposure of the APCs to allergens which could be internalized by the APCs, leading to activation of T cells not specific for the Allergen X (SEQ ID NO:Y) of interest.

[0220] Cells which are not naturally antigen presenting can be engineered to be antigen presenting by introducing sequences encoding appropriate molecules. For example, nucleic acid sequences encoding MHC class II molecules, accessory molecules, co-stimulatory molecules and antigen processing assisting molecules can be introduced after direct synthesis, cloning, purification of DNA from cells containing such genes, and the like. One expedient means to obtain genes for encoding the molecules used in the improved LAMP Constructs and methods described herein is by polymerase chain reaction (PCR) amplification on selected nucleic acid templates with selected oligonucleotide primer pairs. For example, epithelial cells, endothelial cells, tumor cells, fibroblasts, activated T cells, eosinophils, keratinocytes, astrocytes, microglial cells, thymic cortical epithelial cells, Schwann cells, retinal pigment epithelial cells, myoblasts, vascular smooth muscle cells, chondrocytes, enterocytes, thyrocytes and kidney tubule cells can be used. These may be primary cells recently explanted from a host and not extensively passaged in cell culture to form an established cell line, or established cell lines that are relatively homogeneous and capable of proliferating for many generations or indefinitely.

[0221] Cells that are not professional APCs are isolated from any tissue of an autologous donor; a heterologous donor or a xenogeneic donor, where they reside using a variety of known separation methods (Darling, Animal Cells: Culture and Media. J. Wiley, New York, 1994; Freshney, Culture of Animal Cells. Alan R. Liss, Inc., New York, 1987). Non-autologous cells, e.g., heterologous or xenogeneic cells, can be engineered ex vivo to express HLA class I and class II molecules that match known human HLA specificities. These cells can then be introduced into a human subject matching the HLA specificity of the engineered cells. The cells are further engineered ex vivo to express one or more LAMP Constructs according to the invention.

[0222] The engineered cells are maintained in cell culture by standard cell culture methods (Darling, Animal Cells: Culture and Media“. J. Wiley, New York, 1994; Freshney, Culture of Animal Cells”. Alan R. Liss, Inc., New York, 1987). Cell lines for use in the present invention are obtained from a variety of sources (e.g., ATCC Catalogue of Cell Lines & Hybidomas, American Type Culture Collection, 8th edition, 1995), or are produced using standard methods (Freshney, Culture of Immortalized Cells, Wiley-Liss, New York, 1996). Non-transformed cell lines are preferred for use in human subjects.

[0223] In one aspect, CD34+precursors that are differentiating under the influence of GM-CSF into dendritic cells are obtained from the body of a subject and nucleic acids encoding LAMP Constructs according to the invention are introduced into the cells, which are then injected into the subject. Utilizing the improved LAMP Constructs as described herein will enhance the association of peptides derived from a particular antigen with MHC class II molecules on the transduced antigen presenting cells, resulting in significantly more potent systemic T cell dependent immune responses and/or antibody production. While the antigen presenting cells transfected in this strategy are preferably autologous cells, any MHC class II cells that effectively present antigen in the host may be used as described above.

### Peptide Vaccines

[0224] Also within the scope of this invention are peptide vaccines encoded by the improved LAMP Construct. Preferably, the allergen is processed within the compartment/organelle (or subsequent compartment/organelle to which it is delivered) to generate an epitope bound to an MHC class II molecule capable of modulating an immune response.

[0225] The peptide vaccines encoded by the improved LAMP Constructs may also be bound in a membranous structure to facilitate its administration to the body of an organism. For example, the peptide vaccine encoded by the improved LAMP Construct may be incorporated into liposomes, as described in U.S. Pat. No. 4,448,765.

[0226] When a protein or polypeptide is to be used as an immunogen, it may be produced by expression of any one or more of the improved LAMP Constructs described herein in a recombinant cell or it may be prepared by chemical synthesis. For example, the Merrifield technique (Journal of American Chemical Society, vol. 85, pp. 2149-2154, 1968), can be used.

### Treatment of Allergies

[0227] This invention provides a formulation useful for the treatment of pollinosis correlated with Allergen X. It has previously been determined that delivering a DNA plasmid encoding the protein coding sequence of an allergen to an animal can increase IFN-gamma production and lower IL-4 production, which is useful in treating animals allergic to the specific allergen. The present invention provides improved LAMP Constructs for treating patients with an allergy correlated to Allergen X. The improved LAMP Constructs has a specific intracellular trafficking pattern that intersects with MHC class II vesicles, and results in enhanced presentation of Allergen X to the immune system, specifically resulting in an enhanced antibody response. Nucleic acids and compositions provided by the present invention are useful for conducting allergy immunotherapy.

[0228] The present invention provides a formulation that when administered to a cell results in an increased specific antibody response. The increased antibody response to Allergen X is useful for treating an IgE-mediated allergic disease. IgE has certain properties related to its cellular restriction and the resulting intracellular signaling upon binding cognate allergen. IgE is generated against an allergen when B cells receive IL-4 secreted by Th2 cells. This helps instruct B cells to produce IgE class antibodies. Upon secretion by B cells, IgE binds to Fc-ERI, its high affinity receptor expressed by mast cells and eosinophils, resulting in these cells and the animal becoming sensitized to future allergen exposure. Consequently, the symptoms of allergy can be triggered upon the ingestion, inhalation, or mucosal contact with an allergen. Due to the binding properties of antibodies, it has been proposed that one way of reducing allergy symptoms is to chelate free allergen available for binding by IgE through competition with other antibody classes. In particular, an allergy formulation that increases IgG has been proposed to be a pathway for reducing allergic disease. The invention described herein induces enhanced IgG production, thus causing a decrease in the ratio of IgE to IgG in a clinically significant manner.

[0229] In a particularly preferred embodiment, the invention provides a method of treatment or prevention of an allergy to Allergen X by using the improved LAMP Constructs as described herein. In one preferred method, improved LAMP Constructs comprising polynucleotides encoding Allergen X described herein targets the Allergen X allergen to an endosomal/lysosomal compartment or lysosome-related organelle and for association with an MHC class II molecule either within the compartment/organelle or within another compartment/organelle to which the antigen is delivered. Such chimeric DNA molecules can encode additional domain sequences as described above (e.g., sequences encoding transmembrane domains, signal sequences, cytoplasmic domains for targeting to an endosomal/lysosomal compartment or lysosome-related organelles, di-leucine domains, Tyr motif domains, proline rich domains, Ser-Val-Val domains, and the like).

### Host Cells

[0230] In bacterial systems, a number of expression vectors may be advantageously selected depending upon the intended use. For example, when a large quantity of a protein is to be produced (e.g., to express the encoded polypeptides of the improved LAMP Construct), vectors which direct the expression of high levels of fusion protein products that are readily purified may be desirable. Such vectors include, but are not limited to, the E. coli expression vector pUR278 (Ruther et al., EMBO 1. 2:1791 (1983)), in which the coding sequence may be ligated individually into the vector in frame with the lac Z coding region so that a fusion protein is produced; pIN vectors (Inouye & Inouye, Nucleic Acids Res. 13:3101-3109 (1985); Van Heeke & Schuster, J. Biol. Chem. 24:5503-5509 (1989)); and the like. pGEX vectors may also be used to express foreign polypeptides as fusion proteins with glutathione 5-transferase (GST). In general, such fusion proteins are soluble and can easily be purified from lysed cells by adsorption and binding to matrix glutathione agarose beads followed by elution in the presence of free glutathione. The pGEX vectors are designed to include thrombin or Factor Xa protease cleavage sites so that the cloned target gene product can be released from the GST moiety.

[0231] In an insect system, Autographa californica nuclear polyhedrosis virus (AcNPV) may be used as a vector to express the encoded polypeptides of the improved LAMP Construct. The virus grows in Spodoptera frugiperda cells. Coding sequences may be cloned individually into non-essential regions (for example, the polyhedrin gene) of the virus and placed under control of an AcNPV promoter (for example, the polyhedrin promoter).

[0232] In mammalian host cells, a number of viral-based expression systems may be utilized express the encoded polypeptides of the improved LAMP Construct. In cases where an adenovirus is used as an expression vector, the coding sequence of interest may be ligated to an adenovirus transcription/translation control complex, e.g., the late promoter and tripartite leader sequence. This chimeric gene may then be inserted in the adenovirus genome by in vitro or in vivo recombination.

[0233] Insertion in a non-essential region of the viral genome (e.g., region E1 or E3) will result in a recombinant virus that is viable and capable of expressing the encoded polypeptides of the improved LAMP Construct in infected hosts (e.g., see Logan & Shenk, Proc. Natl. Acad. Sci. USA 8 1:355-359 (1984)).

[0234] Specific initiation signals may also be required for efficient translation of inserted coding sequences. These signals include the ATG initiation codon and adjacent sequences. Furthermore, the initiation codon must be in phase with the reading frame of the desired coding sequence to ensure translation of the entire insert. These exogenous translational control signals and initiation codons can be of a variety of origins, both natural and synthetic. The efficiency of expression may be enhanced by the inclusion of appropriate transcription enhancer elements, transcription terminators, etc. (see, e.g., Bittner et al., Methods in Enzymol. 153:51-544 (1987)).

[0235] In addition, a host cell strain may be chosen which modulates the expression of the inserted sequences, or modifies and processes the gene product in the specific fashion desired. Such modifications (e.g., glycosylation) and processing (e.g., cleavage) of protein products may be important for the function of the protein. Different host cells have characteristic and specific mechanisms for the post-translational processing and modification of proteins and gene products. Appropriate cell lines or host systems can be chosen to ensure the correct modification and processing of the foreign protein expressed, to this end, eukaryotic host cells which possess the cellular machinery for proper processing of the primary transcript, glycosylation, and phosphorylation of the gene product may be used. Such mammalian host cells include, but are not limited to, CHO, VERY, BHK, Hela, COS, NSO, MDCK, 293, 3T3, and W138.

[0236] For long-term, high-yield production of recombinant proteins, stable expression is preferred. For example, cell lines which stably express the express the encoded polypeptides of the improved LAMP Construct may be engineered. Rather than using expression vectors which contain viral origins of replication, host cells can be transformed with a polynucleotide controlled by appropriate expression control elements (e.g., promoter, enhancer, sequences, transcription terminators, polyadenylation sites, etc.), and a selectable marker. Following the introduction of the foreign polynucleotide, engineered cells may be allowed to grow for 1-2 days in an enriched media, and then are switched to a selective media. The selectable marker in the recombinant plasmid confers resistance to the selection and allows cells to stably integrate the plasmid into their chromosomes and grow to form foci which in turn can be cloned and expanded into cell lines. This method may advantageously be used to engineer cell lines which express the encoded polypeptides of the improved LAMP Construct.

[0237] A number of selection systems may be used, including but not limited to, the herpes simplex virus thymidine kinase (Wigler et al., Cell 11:223 (1977)), hypoxanthineguanine phosphoribosyltransferase (Szybalska & Szybalski, Proc. Natl. Acad. Sci. USA 48:202 (1992)), and adenine phosphoribosyltransferase (Lowy et al., Cell 22:8 17 (1980)) genes can be employed in tk-, hgprt- or aprt- cells, respectively. Also, antimetabolite resistance can be used as the basis of selection for the following genes: dhfr, which confers resistance to methotrexate (Wigler et al., Natl. Acad. Sci. USA 77:357 (1980); O′Hare et al., Proc. Natl. Acad. Sci. USA 78:1527 (1981)); gpt, which confers resistance to mycophenolic acid (Mulligan & Berg, Proc. Natl. Acad. Sci. USA 78:2072 (1981)); neo, which confers resistance to the aminoglycoside G-418 (Goldspiel et al., Clinical Pharmacy, 12: 488-505 (1993); Wu and Wu, Biotherapy 3:87-95 (1991); Tolstoshev, Ann. Rev. Pharmacol. Toxicol. 32:573-596 (1993); Mulligan, Science 260:926-932 (1993); and Morgan and Anderson, Ann. Rev. Biochem. 62: 191-217 (1993); TIB TECH 11(5):155-2 15 (May; 1993)); and hygro, which confers resistance to hygromycin (Santerre et al., Gene 30:147 (1984)). Methods commonly known in the art of recombinant DNA technology may be routinely applied to select the desired recombinant clone, and such methods are described, for example; in Ausubel et al. (eds.), Current Protocols in Molecular Biology, John Wiley & Sons, NY (1993); Kriegler, Gene Transfer and Expression, A Laboratory Manual, Stockton Press, NY (1990); and in Chapters 12 and 13, Dracopoli et al. (eds), Current Protocols in Human Genetics, John Wiley & Sons, NY (1994); Colberre-Garapin et al., J. Mol. Biol. 150:1 (1981).

[0238] The expression levels of the encoded polypeptides of the improved LAMP Construct can be increased by vector amplification (for a review, see Bebbington and Hentschel, The Use Of Vectors Based On Gene Amplification For The Expression Of Cloned Genes In Mammalian Cells In DNA Cloning, Vol.3. (Academic Press, New York, 1987)). When a marker in the vector system expressing the encoded polypeptides of the improved LAMP Construct is amplifiable, an increase in the level of inhibitor present in the host cell culture will increase the number of copies of the marker gene. Since the amplified region is associated with the coding sequence, production of the encoded polypeptides of the improved LAMP Construct will also increase (Crouse et al., Mol. Cell. Biol. 3:257 (1983)).

[0239] Other elements that can be included in vector sequences include heterologous signal peptides (secretion signals), membrane anchoring sequences, introns, alternative splice sites, translation start and stop signals, inteins, biotinylation sites and other sites promoting post-translational modifications, purification tags, sequences encoding fusions to other proteins or peptides, separate coding regions separated by internal ribosome reentry sites, sequences encoding “marker” proteins that, for example, confer selectability (e.g., antibiotic resistance) or sortability (e.g., fluorescence), modified nucleotides, and other known polynucleotide cis-acting features not limited to these examples.

[0240] Once the encoded polypeptides of the improved LAMP Construct has been produced by recombinant expression, it may be purified by any method known in the art for purification of a protein, for example, by chromatography (e.g., ion exchange, affinity (particularly by Protein A affinity and immunoaffinity for the specific allergen), and sizing column chromatography), centrifugation, differential solubility, or by any other standard technique for the purification of proteins. Further, the encoded polypeptides of the improved LAMP Construct may be fused to heterologous polypeptide sequences described herein or otherwise known in the art to facilitate purification.

### Administration

[0241] Vaccine material according to this invention may contain the immune stimulatory improved LAMP Constructs described herein or may be recombinant microorganisms, or antigen presenting cells which express the immune stimulatory improved LAMP Constructs. Preparation of improved LAMP Constructs containing vaccine material according to this invention and administration of such improved LAMP Constructs for immunization of individuals are accomplished according to principles of immunization that are well known to those skilled in the art.

[0242] Large quantities of these materials may be obtained by culturing recombinant or transformed cells containing replicons that express the improved LAMP Constructs described herein. Culturing methods are well-known to those skilled in the art and are taught in one or more of the documents cited above. The improved LAMP Construct vaccines are generally produced by culture of recombinant or transformed cells and formulated in a pharmacologically acceptable solution or suspension, which is usually a physiologically-compatible aqueous solution, or in coated tablets, tablets, capsules, suppositories or ampules, as described in the art, for example in U.S. Pat. No. 4,446,128, incorporated herein by reference. Administration may be any suitable route, including oral, rectal, intranasal or by injection where injection may be, for example, transdermal, subcutaneous, intramuscular or intravenous.

[0243] The improved LAMP Constructs are administered to a mammal in an amount sufficient to induce an immune response in the mammal. A minimum preferred amount for administration is the amount required to elicit antibody formation to a concentration at least 4 times that which existed prior to administration. A typical initial dose for administration would be 10-5000 micrograms when administered intravenously, intramuscularly or subcutaneously, or 10⁵ to 10¹¹ plaque forming units of a recombinant vector, although this amount may be adjusted by a clinician doing the administration as commonly occurs in the administration of vaccines and other agents which induce immune responses. A single administration may usually be sufficient to induce immunity, but multiple administrations may be carried out to assure or boost the response.

[0244] The improved LAMP Construct vaccines may be tested initially in a non-human mammal (e.g., a mouse or primate). For example, assays of the immune responses of inoculated mice can be used to demonstrate greater antibody, T cell proliferation, and cytotoxic T cell responses to the improved LAMP Constructs than to wild type allergen. Improved LAMP Constructs can be evaluated in Rhesus monkeys to determine whether the vaccine formulation that is highly effective in mice will also elicit an appropriate monkey immune response. In one aspect, each monkey receives a total of 5 mg DNA per immunization, delivered IM and divided between 2 sites, with immunizations at day 0 and at weeks 4, 8, and 20, with additional doses optional. Antibody responses, ADCC, CD4+ and CD8+T-cell cytokine production, CD4+ and CD8+T-cell antigen-specific cytokine staining can be measured to monitor immune responses to the vaccine.

[0245] Further description of suitable methods of formulation and administration according to this invention may be found in U.S. Pat. No. 4,454,116 (constructs), U.S. Pat. No. 4,681,762 (recombinant bacteria), and U.S. Pat. 4,592,002 and 4,920,209 (recombinant viruses).

### Kits

[0246] The invention further comprises kits to facilitate performing the methods described herein. In one aspect, a kit comprises an improved LAMP Construct as described herein and a cell for receiving the improved LAMP Construct. The kit may additionally comprise one or more nucleic acids for engineering the cell into a professional APC. In one aspect, however, the cell is a professional APC. The cell may or may not express co-stimulatory molecules. In a preferred aspect, when the cell does not express co-stimulatory molecules, the allergen encoded by the improved LAMP Construct is an autoantigen. In another aspect, a panel of cells is provided expressing different MHC molecules (e.g., known to be expressed in human beings). In a further aspect, the kit comprises reagents to facilitate entry of the improved LAMP Constructs into a cell (e.g., lipid-based formulations, viral packaging materials, cells, and the like). In still a further aspect, one or more T cell lines specific for the allergen encoded by the improved LAMP Construct is provided, to verify the ability of the improved LAMP Construct to elicit, modulate, or enhance an immune response.

### EXAMPLES

[0247] The invention will now be further illustrated with reference to the following examples. It will be appreciated that what follows is by way of example only and that modifications to detail may be made while still falling within the scope of the invention.

### Example 1—Construction of LAMP Constructs

[0248] The improved LAMP Constructs illustrated in FIG. 1 can be constructed using standard molecular biology techniques well known to the skilled artisan. For example, plasmids comprising the polynucleotides can be designed to generate the different structures ILC-1 to ILC-6 shown in FIG. 1. The LAMP domains illustrated in FIG. 1 can be derived from the amino acid sequences shown in FIGS. 3-10. Preferably the LAMP domains are derived from the human LAMP proteins shown in FIGS. 3-10. The boundaries of each domain can be derived from FIG. 2A and FIG. 2B. It is envisioned that the corresponding domains can also be cloned from the orthologous sequences by identifying the equivalent domains when compared to the human sequence. The Allergen X (SEQ ID NO:Y) can be cloned into the described LAMP Constructs either individually or in combination as described in Table 1/FIG. 14.

### Example 2—Immune Response Evaluation of Mice to LAMP Constructs

[0249] The ability of the improved LAMP Constructs as described in Example 1 can be tested for their ability to modulate an immune response. For example, Female BALB/c mice can be immunized i.d with 50ug of the improved LAMP Constructs in 100 ul PBS using nanopass on day 0, 7, and 14. Experiment will then be terminated 2 weeks after the last dose.

[0250] Splenocytes (3×105/well) are stimulated with allergenic protein (10 ug/ml) in T cell media (RPMI with 10% heat inactivated FBS, 1% penicillin/streptomycin, and 1×2-ME), supernatants are collected 48 h after. Supernatants are diluted (400 ul supernatant+200 ul T cell media) and cytokines are evaluated by ELISA. IL-10 or IL-4 production can be measured via ELISPOT assay.

[0251] Alternatively, serum samples can be diluted 1:100 (day 21), 1:2000 (day 35) or 1:5000 (day 56) fold in 1% BSA in PBS. Day 56 samples are further diluted by a 7 point 1:3 serial dilution to measure the endpoint antibody titers. To detect IgE, sera can be treated with Agarose-Protein G (Thermo Fisher Scientific, Rockford, Ill.) 50 minutes and then 1:20 diluted samples are loaded to ELISA plates. Samples are detected with goat anti-mouse IgG1-HRP, goat anti-mouse IgG2a-HRP (Southern Biotech, Birmingham, Ala.), or rat anti-mouse-IgE-biotin (R35-118, BD Pharmingen, San Jose, Calif.) followed Pierce Streptavidin-HRP (Thermo Fisher Scientific, Rockford, Ill.). Reaction is developed with SureBlue TMB Substrate and stopped with TMB Stop Solution. Plates are read (OD450) by using Epoch ELISA reader (BioTek, Winooski, Vt.). Endpoint titers are determined by subtracting twice above the of background average (PBS) reading. The means and standard errors of endpoint titers or OD450 values per group are analyzed by using Excel statistic function. IgE data is analyzed by using Student T test. Tests are two tailed, and p values≤0.05 were considered significant. After three doses of vaccination, antigen-specific IgG1 and IgG2a antibodies are expected to be observed in the recipient mice. It is believed that IgG2a levels will be much higher than expected due to the predicted Th2 to Th1 skewing of the immune response.

### Example 3—Prime/Boost Protocol

[0252] Herpesvirus entry mediator (HVEM), also known as tumor necrosis factor receptor superfamily member 14 (TNFRSF14) or CD270, is a human cell surface receptor of the TNF-receptor superfamily. In recent years, HVEM has been found highly expressed on hematopoietic cells and a variety of parenchymal cells, such as breast, melanoma, colorectal, and ovarian cancer cells, as well as gut epithelium. HVEM is a bidirectional protein, either inhibiting or stimulating T cells, through binding to BTLA or LIGHT (TNFSF14).

[0253] We generated a DNA vaccine encoding HVEM-LAMP to generate an antibody which could block the inhibitory function of HVEM for tumor therapeutic applications. We hypothesized that LAMP will promote the antibody response by enhancing the affinity of HVEM specific antibodies and/or expanding the repertoire of B cell epitopes in the HVEM protein. In this study, we compared the immunogenicity of HVEM encoding plasmid with and without LAMP (SEQ ID NO: 158 and SEQ ID NO:159). Plasmids encoding HVEM-LAMP and HVEM and recombinant HVEM protein were designed as described herein.

[0254] Goat anti-mouse IgG-HRP was purchased from Southern Biotechnologies (Birmingham, Ala.). SureBlue TMB microwell peroxidase substrate and TMB stop solution were purchased from KPL (Gaithersburg, MD). ELISPOT plates were ordered from EMD Millipore (Billerica, Mass., Cat. No. MAIPS4510). IFN-γ antibody pair used in ELISPOT was purchased from BioLegend (San Diego, Calif.) and clones AN18 and R46A2 were used as coating and detection, respectively. Streptavidin-HRP and AEC substrate were purchased from BD Biosciences (San Jose, Calif.).

[0255] Six to eight week old female Balb/c mice were purchased from Harlan Laboratories (Frederick, Mass.) and maintained at animal facility in Immunomic Therapeutics, Inc. (Rockville, Mass.). Mice (n=6) were treated with 10 μg/dose of HVEM-LAMP, HVEM, or LAMP vector control by electroporation IM delivery at days 0, 7, and 14. On day 35, mice were boosted with 5 μg HVEM protein in the presence of Alum by i.p. injection. On day 28 and 49, mice were bled and sera were isolated for antibody detection. Mice were sacrificed on day 56 and splenocytes were tested for IFN-γ production by ELISPOT.

[0256] ELISA procedure was followed by Su et al., J of Immunol Res; (10):1-15 (2016). Plates were coated with 5 μg/ml HVEM protein. Data were analyzed by using Microsoft Excel and Prism 6 software.

[0257] The primary aim of this study was to compare the antibody profiles between HVEM-LAMP and HVEM. On day 28, HVEM-LAMP vaccinated mice produced significant higher level of HVEM specific IgG antibody than that of the HVEM group (FIG. 11). After a protein boost, the HVEM specific antibody was increased about 1000-fold in HVEM immunized mice and the mean titer was changed from 100 to 108000. This result indicates that the immune memory was induced by the HVEM DNA plasmid. Although HVEM DNA alone only induced a minimal antibody response, protein boost rapidly recalled the immune memory. On the other hand, HVEM-LAMP group again exhibited a significant higher titer than the HVEM and LAMP groups, the mean titer is 5 folds of the HVEM group, indicating the power of LAMP in enhancing antibody response (FIG. 12).

[0258] Additionally, serum samples (Day 49) from HVEM+LAMP or HVEM alone immunized/HVEM protein boosted mice were pooled and tested for peptide mapping. Twelve peptides were found to be bound to the pooled serum (mouse IgG reaction) and seven of the twelve peptides showed strong binding affinity. HVEM+LAMP alters the binding affinity of peptides 17. 24, 25, and 28 as compared to HVEM alone as shown in FIG. 13. These changes may have physiological effects in protecting tumor growth.

[0259] This example illustrates the ability to use a prime-boost protocol with the improved LAMP constructs described herein along with the described allergens.

### Example 4—Testing of Amb a 1-hLAMP

[0260] Ragweed, a major allergy risk factor, is one of the most important pollen allergens in North America and parts of Europe. Epidemiological studies showed that 23% to 32.8% of the US population is sensitized to ragweed, whereas prevalence of sensitization in European countries varies between 3.5% (eg, Italy) and 54% (eg, Hungary). Amb a 1, the most abundant allergen in ragweed pollen, is composed of a mixture of five isoforms with amino acid sequence identities ranging between 63% and 87%. The clinical relevance of Amb a 1 has been documented in numerous publications. DNA vaccination has great potential as an effective prophylactic and therapeutic solution to ragweed pollen allergy. We have previously integrated the advantages of the DNA vaccine technique with the MHC II pathway targeting property of LAMP-1 and designed a novel DNA vaccine against ragweed allergy.

[0261] Here, we optimized our LAMP platform by replacing the hinge region of LAMP (ILC-4). This study aims to compare the in vivo immunogenicity of different version of Amb a 1-LAMP vaccines using the sequence of SEQ ID NO:137 as the allergen. Control vector, Amb a 1-hLAMP (complete LAMP), Amb al-hLAMP preluminal (ILC-1), Amb al-hLAMP Hinge (ILC-4), and Amb a 1 protein were made by NTC (Lincoln, Neb.). Goat anti-mouse IgG2a-HRP and goat anti-mouse IgG1-HRP were purchased from Southern Biotechnologies (Birmingham, Ala.). SureBlue TMB microwell peroxidase substrate and TMB stop solution were purchased from KPL (Gaithersburg, Md.). Mouse monoclonal anti-hLAMP was purchased from Origene Technologies (Rockville, Md.). Rabbit monoclonal anti-GAPDH antibody was bought from Abcam (Cambridge, Mass.). Goat-anti-mouse and goat anti-rabbit secondary antibody were obtained from Sino Biological (Wayne, Pa.)

[0262] Vaccines, adjuvants and immunizations. 40 μg of Control vector, complete LAMP, ILC-1, and ILC-4 were used in a total volume of 20 μl per mouse per dose for intradermal/electroporation injection. Mice were immunized with the vaccine by i.d. delivery on days 0, 7, and 14. Mice were bled on days 28 and day 40 for serum collection. Serum was collected and stored in −30° C.

[0263] Western Blot. 293T cells were transfected with the plasmids using lipofectamine 2000 reagents (Invitrogen). Transfected cells were washed with PBS and suspended in 200 μl of RIPA lysis buffer with halt proteinase inhibitors (Thermo Scientific, Waltham, Mass.). Lysates were centrifuges (700 g for 15 minutes at 4° C.), followed by measurement of protein concentration in the clarified supernatants using Pierce BCA protein Assay kit (ThermoFisher Scientific, Waltham, Mass.). 5 μg of protein was electrophoresed in pre-cast (4-20%) SDS-PAGE gels (BioRad, Hercules, Calif.), and transferred onto nitrocellulose membranes (BioRad). Membranes were blocked with Detection™ block buffer (KPL) and probed anti-human LAMP (FIG. 15A) or anti-GAPDH and goat anti-mouse-HRP or goat anti-rabbit antibody (FIG. 15B), followed by developing with TMB (KPL).

[0264] Measurement of serum Amb a 1-specific IgG1 and IgG2a by ELISA. As shown in FIG. 16, the murine antibody response to Amb a 1 was assessed by indirect ELISA. ELISA plates (MaxiSorp) were coated with 5 μg/ml Amb a 1 in PBS buffer overnight and then blocked with 2% BSA in PBS. Plasma samples were diluted 1:300 or 1:1000 in blocking buffer. Samples were detected with goat anti-mouse IgG1-HRP or IgG2a-HRP. Reaction was developed with SureBlue TMB Substrate and stopped with TMB Stop Solution from KPL (Gaithersburg, Md.). Plates were read (OD450) by using Epoch ELISA reader (BioTek, Winooski, Vt.).

[0265] Statistics. Two-Way ANOVA test was performed using GraphPad Prism 6.0 software to evaluate the statistical significance. Data represent mean of antibody titers±SEM (n=9). Two-way ANOVA was used for statistical analysis. * p<0.05; ** p<0.01, *** p<0.001 **** p<0.0001.

[0266] Results. In this study, we tested different constructs of Amb a 1-LAMP vaccines. After 3 dose of DNA vaccines (one week apart), we found ILC-1 and ILC-4 induced unexpectedly higher Amb a 1 specific IgG2a response at day 40 than the complete-LAMP Amb a 1 vaccine.

### Example 5—Testing of Bet v 1-hLAMP

[0267] Bet v 1, the major birch pollen allergen, is considered the prototype for the PR-10 protein family causing respiratory allergy. The greatest majority of birch allergy patients (over >90%) react to Bet v 1, and as a consequence is used as a marker for birch pollen allergy. DNA vaccination has great potential as an effective prophylactic and therapeutic solution to birch pollen allergy in early spring.

[0268] Here, we tested protein expressed from control vector Bet v 1-hLAMP (complete LAMP), Bet v 1-hLAMP preluminal (ILC-1), Bet v 1-hLAMP Hinge (ILC-4), and Bet v 1 protein as described in Example 4. In this Example, the sequence of SEQ ID NO:141 is the allergen. FIG. 15A and FIG. 15B demonstrate expression. As shown in FIG. 17, after 3 dose of DNA vaccines (one week apart), we found ILC-4 induced unexpectedly significantly stronger Bet v 1 specific IgG2a response at day 28 and day 41 than the complete-LAMP Bet v 1 and ILC-1 vaccine, suggesting this new version of Bet v 1-LAMP construct is very immunogenic.

### Example 6—Testing of Fel d 4-hLAMP

[0269] Cats are popular household pets and commonly cause allergies. Cat allergy is unique among allergy to mammals in that the major allergen Fel d 1 is a uteroglobin-like protein and not a lipocalin. However, Fel d 4, which has been identified as a lipocalin allergen produced by the cat, binds IgE at relatively high frequency in cat-sensitive individuals. The biochemical spectrum of the cat allergens is thus uncertain, particularly with regard to the role that a cat lipocalin protein may play in sensitization to cats in allergic individuals. Recently, Fel d 1- and Fel d 4-specific IgE was assessed in patients with pet allergy. Of those with cat allergy, 94% had increased levels (>0.35 kU/L) of Fel d 1, and 49% had increased levels of Fel d 4.

[0270] Here, we tested protein expressed from control vector Fel d 4-hLAMP (complete LAMP), Fel d 4-hLAMP preluminal (ILC-1), Fel d 4-hLAMP Hinge (ILC-4), and Fel d 4 protein as described in Example 4. FIG. 15A and FIG. 15B demonstrate expression. In this Example, the sequence of SEQ ID NO:182 is the allergen. As shown in FIG. 18, after 3 dose of DNA vaccines (one week apart), we found ILC-1 induced slightly higher Fel d 4 specific IgG2a response at day 28 and day 41 than the other groups. However, there is no statistical difference between ILC-1 and ILC-4.

### Example 7—Testing of Cry J 1

[0271] The Japanese red cedar tree is a cultural symbol in Japan, but its pollen is a national scourge. An estimated 25% of the Japanese population, more than 25 million individuals, are allergic to Japanese red cedar pollen.

[0272] We tested Cry J1 and Cry J2 specific antibody responses by ELISA. FIG. 15C. In this Example, the sequence of SEQ ID NO:224 is the allergen. Female BALB/c mice were immunized ID with 40 ug of control vector, CryJ1+CryJ2+Complete LAMP, or Cry J1+J2+ILC-4 DNA in 20 ul PBS via the ear on day 0, 7, and 14. The study was terminated 26 days after the last dose. Serum samples were collected at day 28 and day 40. Cry J1 and Cry J2 specific IgG1 and IgG2a were measured by indirect ELISA. Data represent mean of antibody titers±SEM. N=6 per group. Two way ANOVA was used for statistical analysis. *p_{<}0.05, ** p_{<}0.01.

[0273] The complete and ILC-4 single Cry J1+J2+LAMP constructs were compared. Cry J1 and Cry J2 specific IgG1 and IgG2a responses are summarized in FIG. 19. Although the ILC-4 construct showed a trend of higher titers with Cry J1, these were not statistically significant. In the Cry J2 specific response, however, the titers were statically higher than the Complete LAMP construct.

[0274] In conclusion, data from this study suggest that two constructs were expressed in vivo and LAMP significantly improved the humoral immune response.

[0275] Variations, modifications, and other implementations of what is described herein will occur to those of ordinary skill in the art without departing from the spirit and scope of the invention and the claims. All of the patents, patent applications, international applications, and references identified are expressly incorporated herein by reference in their entireties.

The application's sequence listing, which the Patent Office published only in electronic form, follows.

SEQUENCE LISTING (250 sequences)

SEQ ID NO: 1 - protein, 417 aa, Homo sapiens
MAAPGSARRPLLLLLLLLLLGLMHCASAAMFMVKNGNGTACIMANFSAAFSVNYDTKSGPKNMTFDLPSDATVVLNRSSCGKENTSDPSLVIAFGRGHTLTLNFTRNATRYSVQLMSFVYNLSDTHLFPNASSKEIKTVESITDIRADIDKKYRCVSGTQVHMNNVTVTLHDATIQAYLSNSSFSRGETRCEQDRPSPTTAPPAPPSPSPSPVPKSPSVDKYNVSGTNGTCLLASMGLQLNLTYERKDNTTVTRLLNINPNKTSASGSCGAHLVTLELHSEGTTVLLFQFGMNASSSRFFLQGIQLNTILPDARDPAFKAANGSLRALQATVGNSYKCNAEEHVRVTKAFSVNIFKVWVQAFKVEGGQFGSVEECLLDENSMLIPIAVGGALAGLVLIVLIAYLVGRKRSHAGYQTI

SEQ ID NO: 2 - protein, 410 aa, Homo sapiens
MVCFRLFPVPGSGLVLVCLVLGAVRSYALELNLTDSENATCLYAKWQMNFTVRYETTNKTYKTVTISDHGTVTYNGSICGDDQNGPKIAVQFGPGFSWIANFTKAASTYSIDSVSFSYNTGDNTTFPDAEDKGILTVDELLAIRIPLNDLFRCNSLSTLEKNDVVQHYWDVLVQAFVQNGTVSTNEFLCDKDKTSTVAPTIHTTVPSPTTTPTPKEKPEAGTYSVNNGNDTCLLATMGLQLNITQDKVASVININPNTTHSTGSCRSHTALLRLNSSTIKYLDFVFAVKNENRFYLKEVNISMYLVNGSVFSIANNNLSYWDAPLGSSYMCNKEQTVSVSGAFQINTFDLRVQPFNVTQGKYSTAQDCSADDDNFLVPIAVGAALAGVLILVLLAYFIGLKHHHAGYEQF

SEQ ID NO: 3 - protein, 416 aa, Homo sapiens
MPRQLSAAAALFASLAVILHDGSQMRAKAFPETRDYSQPTAAATVQDIKKPVQQPAKQAPHQTLAARFMDGHITFQTAATVKIPTTTPATTKNTATTSPITYTLVTTQATPNNSHTAPPVTEVTVGPSLAPYSLPPTITPPAHTTGTSSSTVSHTTGNTTQPSNQTTLPATLSIALHKSTTGQKPVQPTHAPGTTAAAHNTTRTAAPASTVPGPTLAPQPSSVKTGIYQVLNGSRLCIKAEMGIQLIVQDKESVFSPRRYFNIDPNATQASGNCGTRKSNLLLNFQGGFVNLTFTKDEESYYISEVGAYLTVSDPETIYQGIKHAVVMFQTAVGHSFKCVSEQSLQLSAHLQVKTTDVQLQAFDFEDDHFGNVDECSSDYTIVLPVIGAIVVGLCLMGMGVYKIRLRCQSSGYQRI

SEQ ID NO: 4 - protein, 478 aa, Homo sapiens
MGRCCFYTAGTLSLLLLVTSVTLLVARVFQKAVDQSIEKKIVLRNGTEAFDSWEKPPLPVYTQFYFFNVTNPEEILRGETPRVEEVGPYTYRELRNKANIQFGDNGTTISAVSNKAYVFERDQSVGDPKIDLIRTLNIPVLTVIEWSQVHFLREIIEAMLKAYQQKLFVTHTVDELLWGYKDEILSLIHVFRPDISPYFGLFYEKNGTNDGDYVFLTGEDSYLNFTKIVEWNGKTSLDWWITDKCNMINGTDGDSFHPLITKDEVLYVFPSDFCRSVYITFSDYESVQGLPAFRYKVPAEILANTSDNAGFCIPEGNCLGSGVLNVSICKNGAPIIMSFPHFYQADERFVSAIEGMHPNQEDHETFVDINPLTGIILKAAKRFQINIYVKKLDDFVETGDIRTMVFPVMYLNESVHIDKETASRLKSMINTTLIITNIPYIIMALGVFFGLVFTWLACKGQGSMDEGTADERAPLIRT

SEQ ID NO: 5 - protein, 197 aa, Homo sapiens
MSRLSRSLLWAATCLGVLCVLSADKNTTQHPNVTTLAPISNVTSAPVTSLPLVTTPAPETCEGRNSCVSCFNVSVVNTTCFWIECKDESYCSHNSTVSDCQVGNTTDFCSVSTATPVPTANSTAKPTVQPSPSTTSKTVTTSGTTNNTVTPTSQPVRKSTFDAASFIGGIVLVLGVQAVIFFLYKFCKSKERNYHTL

SEQ ID NO: 6 - protein, 406 aa, Mus musculus
MAAPGARRPLLLLLLAGLAHGASALFEVKNNGTTCIMASFSASFLTTYETANGSQIVNISLPASAEVLKNGSSCGKENVSDPSLTITFGRGYLLTLNFTKNTTRYSVQHMYFTYNLSDTEHFPNAISKEIYTMDSTTDIKADINKAYRCVSDIRVYMKNVTVVLRDATIQAYLSSGNFSKEETHCTQDGPSPTTGPPSPSPPLVPTNPTVSKYNVTGNNGTCLLASMALQLNITYLKKDNKTVTRAFNISPNDTSSGSCGINLVTLKVENKNRALELQFGMNASSSLFFLQGVRLNMTLPDALVPTFSISNHSLKALQATVGNSYKCNTEEHIFVSKMLSLNVFSVQVQAFKVDSDRFGSVEECVQDGNNMLIPIAVGGALAGLVLIVLIAYLIGRKRSHAGYQTI

SEQ ID NO: 7 - protein, 411 aa, Danio rerio
MARAAGVCWTLLMGCVFAAHAVTFEVTDGNSTCIKGELNASFSISYNTTNGTSVSVFALPASASVSERSSCGSAAVPPELALVFGDTHTHTLSLLFSRDQRLYRVSNISLQYNLSDGDIFPQSSSAGVQSVMASVSELMSARLNSTYRCVSSSSISLSAAVNLTLSGVQMEAYMSSANLSADESVCSADQPSTTVAPPPSTTTSPPPIPPVPERGNYSVTDGNGTVCVLALMGLQLNITHTTTQNQSVSELMNLQPNQTTVSGSCGVTESSLRLSDETTNLTFSFTMNSTTQKYYLSAVSVSALWPDMSVVFEAGNTSLSALQCSVGRSYVCSAQQMLSVTPVFSINTFRLQLQPFNITANRFSTAEECRVDQENMLIPIIVGAALAGLVLIVLVAYLIGRKRTHAGYQTI

SEQ ID NO: 8 - protein, 417 aa, Xenopus laevis
MSWRQVKMPVYWMAVMLLIGVVQVATAVQFEVKDGKTNITCILADLSINFSVSYNVSSKMELATFVLPSEAVTNINKSSCGVENTTAPVLAIQFGSNHSLSIHFARNNTRYEVAELVMSYNLSDKIIFPNASENGTKTVSTNKTAVLAENDTVYKCMNPHLIRMDNANATFHDIRLEAYLKQSNFSQKVSTCSEDITPTSAPAPVTTTAPVPAPVPDPPVVQYSVNRSSEPCLLAKVGLQMNITYTTKDGKNGSYVFNIESKGVTVDGNCTNTTAYLSLSTGSIDLRFNFTLNSSLEVFYLDGVSLSTGLPADANDTHFEAANSSLNYMQTNVHKSFKCNSKQTLQITDPFTVNTYHLQVQAFNSDNTFASAVECSLDENGMLVPIVVGAALAGLVLIVLIAYLIGRKRSHAGYQTI

SEQ ID NO: 9 - protein, 417 aa, Pan troglodytes
MAAPGSARRPLLLLLLLLLLGLVHCASAAMFMVKNGNGTACIMANFSASFSVNYDTKSGPKNMTFDLPSDATVVLNRSSCGKENTSDPSLVIAFGRGHTLTLNFTRNATRYSVQLMSFVYNLSDTHLFPNASSKEIKTVESITDIRADIDKKYRCVSGTQVHMNNVTVTLHDATIQAYLSNSSFSRGETRCEQDRPSPTTAPPAPPSPSPSPVPESPSVDKYNVSGTNGTCLLASMGLQLNLTYERKDNTTVTRLLNINPNKTSASGSCGAHLVTLELHSEGSTVLLFLFGMNASSSRFFLQGIQLNTTLPDARDPAFKAANGSLRALQATVGNSYKCNAEEHVRVTKAFSVNIFKVWVQAFKVEGGQFGSVEECVLDENNMLIPIAVGGALAGLVLIVLIAYLVGRKRSHAGYQTI

SEQ ID NO: 10 - protein, 415 aa, Macaca mulatta
MAAPGSARRSLLLLLLLLLGLTHCASAAMFIVKNGNGTACIMANFSAAFSVNYDTKSGPKNMTFDLPSDAKVVLNSSSCGKENTSDPSLVIAFGRGQTLTLNFTRNATRYSVQLMSFVYNLSDTHLFPNASSKEIKTVESITDIRADIDKKYRCVSGTQVHMNNVTVTLHDATIQAYLSNSSFSREETRCEQDRPSPTTAPPAPPSPSPSPVPESPSVDKYNVSGTNGTCLLASMGLQLNLTYERKDNTTVTRLLNINPNKTLASGSCGAHLVTLELHSEGSTVLLFQFGMNASSSRFFLQGIQLNTTLPDARDPAFKAANSSLRALQATVGNSYKCNAEEHVRVTKAFSVNIFKVWVQAFKVEGGQFGSVEECLLDENNMLIPIAVGGALAGLVLIVLIAYLVGRKRSHAGYQT

SEQ ID NO: 11 - protein, 413 aa, Canis lupus familiaris
MAAFGGARPRPLLLLLLAGLVHGAAAVFVVKDANGTACIMANFSAAFLASYETRSGPKNVTFDLPSDAVVLNSSSCGKENTSDPSLMIAFGKGHGLTLNFTRNATRYSVQLMSFIYNLSDTQIFPNASSKETKTVESATDIRADINKKYRCVSNTQIHMHNVTVTFHDVTIQAYLANSNFSKEETRCEQDGPFPTTAPPPPPHPSPSPAPESPSVHKYNVSGANGTCLLASMGLQLNVTYKKKDNTTVVKVVSINPNKTTAGGSCGAQLVTLELRSESVTLLAFQFGMNASTSRFFLQGIQLNMTLPDARDPTFKAGNNSLRALQATIGNSYKCNAGEHVQVTEAFSVNIIKVWVQAFQVQGDKFGSVEECQLDENSMLIPIAVGGALAGLVLIVLIAYLIGRKRSHAGYQTI

SEQ ID NO: 12 - protein, 417 aa, Oryctolagus cuniculus
MEAPGGARRPLLLLLLLGLVHGASAVFVVRNSNGTACIMANFSAVFSVIYESKSGYKNASFELPATAEVQNTSSCGRENTSNPSLQIAFGRGHVLALNFTRNATLYSVPLLSFVYNLSDSDLFPNASSKDIKTVGSTTDIKADIDKRYRCVSDSKVPMGNVTVTLQDATIQAYLWNNSFSQAESRCRQDMPSPTTAPPAPPVPPSPPSPSPPPKPESPSVSRYNVSDGNATCLLASMGLQLNLTYVHRDNATVTRVFNINPNKTKPSGHCGAQQVTLELQSERSTVLVFQFGMNASSGQYFLQGVLLNTTLPDAREPAFSASNSSLRALQATLGNSYKCNSEEHVRVTPAFSLSIFKVWVQAFQVKGDKFGSVEECLLDQDSMLIPIAVGGALAGLVLVVLIAYLIGRKRSHAGYQT

SEQ ID NO: 13 - protein, 409 aa, Bos taurus
MAAPGGARRRPLLLLLFAGLVHGASAVFVVKNGNGTACIMADFSATFLTSYDTRSGPQNKSFELPAGAEVSNSSSCGKENASDSSLVITFGRGHTLTLIFTRNATRYEVQLMRFAYNLSDTDTFPNSSSTGVKTVESATDIKADINKTYRCVSETQVNMDNVTVTLRDAAIQAYLSSSNFSREETRCEQDLPTPTTPPQPAPTPAPASPAVFRYNVSGSNGTCLLASMGLQLNVTYRRVDNKTVTREFNVNPNKTTFGGNCSATLATLELHSENLLLLALQFVMNESSSRVFLQGVQLNLTLPDAKEGSFTATNSSLRALQATAGNSYKCNAEQRLRVTSSFSLNMFRVWLQAFRVDGDKFGPVEECQLDENSMLIPIAVGGALAGLVLIVLLAYLIGRKRSHAGYQTI

SEQ ID NO: 14 - protein, 407 aa, Rattus norvegicus
MAAPGARRPLLLLLLAGLAHSAPALFEVKDNNGTACIMASFSASFLTTYDAGHVSKVSNMTLPASAEVLKNSSSCGEKNASEPTLAITFGEGYLLKLTFTKNTTRYSVQHMYFTYNLSDTQFFPNASSKGPDTVDSTTDIKADINKTYRCVSDIRVYMKNVTIVLWDATIQAYLPSSNFSKEETRCPQDQPSPTTGPPSPSPPLVPTNPSVSKYNVTGDNGTCLLASMALQLNITYMKKDNTTVTRAFNINPSDKYSGTCGAQLVTLKVGNKSRVLELQFGMNATSSLFFLQGVQLNMTLPDAIEPTFSTSNYSLKALQASVGNSYKCNSEEHIFVSKALALNVFSVQVQAFRVESDRFGSVEECVQDGNNMLIPIAVGGALAGLVLIVLIAYLIGRKRSHAGYQTI

SEQ ID NO: 15 - protein, 414 aa, Gallus gallus
MGGAARAVLLGFLQASSSFDVRDSTGKVCIIANLTVAFSVEYKSSGQKQFAHFFLPQNATSQSHSSCGEGNTSHPILALSFGAGHLISLNFSKTLDKYQVEELTFHYNLSDETLFPNATEGKVMVATQKSVIQARIGTEYRCINSKYVRMKHVNITFSNVTLEAYPTNDTFSANKTECREDMVSTTTVAPTTPKHATSQVPTTSPAPTAAPSSPAVGKYNVTGANGTCVLASMGLQLNITYVKKDEKMGLDLLNFIPHNTSASGMCESTSAFLNLAFEKTKITFHFVLNASSEKFFLQGVNVSTTLPSEAKAPTFEASNDSMSESRATVGNSYKCSAEENFQVTDKALVNVFNVQVQAFKVDGDKFGAMEECQLDENNMLIPIIVGAALAGLVLIVLIAYLIGRKRSHAGYQTI

SEQ ID NO: 16 - protein, 413 aa, Sus scrofa
MAAPGGAWRRPLLLLLLLLGLARGASAVFVVSDGNGTACIMADFAAAFEISYDSRSGAKNTTFSLPASAQVLNSSSCGKENTSDSSLVIAFGRGHTLTLSFTRNATRYSVQLMTLVYNLSDAEFFPSASSKGTKTVAASTDIRADLNTKYRCVSNSQVHLLNVTVTLGNATIQAYLANNSFSQQETRCEQDKPSPPTPTAPPTPTPTPAPTSPVVSRYNVSGANGTCLLASMGLQLNVTYRTKDNTTVTRGLNINPNKTTFGGSCSAQLVTLELQGESLRLLALQFALNTSSSRVFLQGVQLNMTLPDARDPSFSAANSSLRALQATAGNSYKCRSEQRLQVTEAFALNVFQVRVQAFRVDGDKFGPAEECQLDENSMLIPIAVGGALAGLVLVVLMAYLVGRKRSHAGYQTI

SEQ ID NO: 17 - protein, 422 aa, Monodelphis domestica
MAEPGGARTPQRLLLLLLGLIHVASSIFVVKNGTGTACIMANFSATFSMNYTTKSGLESTTFRLPQNASVMNSSSCGKENTSNPILEIGFGGGHTLTMNFSSTTQSYQVELLSFSYNLSDATLFPNASKGSEESSVKSKTDIQADIHKKYRCVSSNRITMSNVTIVLSDVTIQAYLSNNTFSKEETRCSQDTPSPSPVPTTHPTTIPVPTPTPTRPPTPAEIPPIFKYNVSDANGTCLLASMGLQLNITYAKKDNSSARIIWNINPNKTVAGGSCSPQVAILELQTENSTLAFSFGMNATTSKFFLREIRFHKFFPDAKDPAFGAVNSSLKELQATVGNSYKCNAEENVHVTDGFSVNIFRVRVQAFKVEGDKFGSVEECLLDENNMLIPIAVGGALAGLVLIVLIAYLIGRKRSHAGYQTI

SEQ ID NO: 18 - protein, 415 aa, Meleagris gallopavo
MARALLAAVLLGFLQASSSFDVRDSTGKVCIIANLTVAFSVEYKSNGQKQFAHFFLPQNATSQSHSSCGEGNTSHPILALSFGAGHLLSLNFSKTLDKYQVEELTFHYNLSDETLFPNASEGKVMEVTQKSVIQARIGTEYRCINSKYIYIRHVNITFSNVTLEAYPTNGTFSTNKTECSEDMVSTTTVAPTTPKHITSQVPATSPAPTAAPSNPAVGKYNVTGANGTCVLASMGLQLNITYLKKDGKTGLDLLNFVPHNTNASGTCENTSAFLNLAFEKTKITFHFVLNASSEKFFLQGVNVSTTLPSEAKAPMFEASNDSMSELRATVGNSYKCSAEENLQVTDKALVNVFNVQVQAFKVDGDKFGAVEECQLDENNMLIPIIVGAALAGLVLIVLIAYLIGRKRSHAGYQTI

SEQ ID NO: 19 - protein, 415 aa, Taeniopygia guttata
MARGLLAAAALLGFLQASSSFEVKDSSGKVCILADLTVAFSVEYKTNVQKEFVHFFLPQNASVDSQSSCGKDNASHPILVLDFGGGHSLSLNFSESADKYQVEELVFHYNLSDATLFPNSSTGGMKTVSHKSIIQAHMGTQYRCINSKHINMKNVNVTFSNVTLEAYLTNGTLSVNKTECAEDRVSTTTMVPTTPKQTTSQSPTTGPAPTSPPNPTVGKYNVTGPNGTCVLAYMGLQLNITYQQKDEKMGLDLLNFVPHNTTSSGRCDNTSALLNLTFEKTRVIFQFALNATAEKFFLQGVSVSTTLPSEAKNPKFEATNNSMSELRASVGNSYKCSSEENLQVTDQALVNVFNVQVQIFKIDGDKFGPVEECQLDENNMLIPIIVGAALAGLVLIVLIAYLIGRKRSHAGYQTI

SEQ ID NO: 20 - protein, 418 aa, Anolis carolinensis
MVSSSSCRRGLLLAAVLLGFLQASSTFEVRDKTGKICILANFSAEFTVDYSTKAKVERKTFQLPSSAHINKESSSCGKEKETSQVLVVEFGTGNSLTFTFEKSNDFYHVSNLTFSYNLSDSSFFPNSSGGQREVSRAGDIQANINTTYRCRSNHRVNMTNVTVLFSNVTLEAYLPNNAFSKNDSVCAEDKTSTVAPPITTHIPTTTSLAPPTPPPTDTPKIGRYNVTGLHGICLLATMGLQVNVTYSTKNKTSKSELLNLPPTAEVSGTCENSSITLNLTSESTSLSFQFSQNTSTEKYFLQGIIVTANLPPEATEKNISYSNHTLNALKTSVGKSYKCIAEESIWISGKAAVNIFNIQLQAFKIPGDKFGAVEECQLDENNMLIPIIVGAALAGLVLIVLIAYLIGRKRSHAGYQTI

SEQ ID NO: 21 - protein, 418 aa, Oryzias latipes
MKSFPSFVALFIVCSAVLADTQAVVTLEVKEGNSTCIKAEFSAVFSITYNTTNDTRTVSVFLPNSTTVDSANSSCGSNGSTPGLMAKFGPGHYFGMNFSTNGSLYSVDTLFLRYNLSDASLFPEANSSGPVDFELSASVGIWAPTNTTYRCLSPTTITITRPSVTFSEMKLEAYMPGNDFSPAERVCAADQTTTGAPTTTTSAATPTTPSPTPAGTPEQGSYSVKNASGTVCLMAKMGVQLNVSYFSQSQNKTVQELLNLTPNLTSSSGLCGGTNATLVLAQEETTVLSFLFTVNSTSNKYHLSGITLQANWTDMMSPFSASNTSLDYLRSSLGHSYMCNAEQTLFVVSTFSINMFELQVQPFGVTSTQFASAEVCQIDQDQMLIPIIVGAALAGLVLIVLIAYLIGRKRSHAGYQTI

SEQ ID NO: 22 - protein, 420 aa, Takifugu rubripes
MKRSHALVVLIIAWFSLSGCIQAVSLEVKEGNSTCIKANLSAYFSITYNTSSSTRTAQFILPDSATVDPDSSTCGGNGSSPWLVAVFGAGHALGLGFSTNGSFYSVANLTLQYNLSDASVFPDANSSGVVTVVSSSVGIWAAVNTTYRCLSSVLFQVGGATVTFSDMRLEAYMPGNDLSPRESFCAADQTTTAPPTTTAAPTTTAATTMAPPAPTPPGTPVRGTYSVVNGNDTTCLLAQMGLQLNVSYFSRSQNKTVQSLVNLTPNLTNSTGSCEKGSATLILTQQTTILIFTFSLNSTSSKYHLSGLSLQANWSDMAAAFSASNASLSYLRSTFGHSYMCNAEQILAVTPVFSLNTFSLQIQPFGVTTNQFAAAEECQMDQDQMLIPIIVGASLAGLVLIVLIAYLIGRKKSHAGYQTI

SEQ ID NO: 23 - protein, 419 aa, Salmo salar
MTRTCPFVVGIACFAILGCVTVVQSQVTLEVTEGNSTCIKAELSASFSITYDTANGTRTVMVPLPGSAVVGVASSCGGDGRSPWLVALFGDGHALGLGFSSNDSLYSVAKLTLQYNLSDVSNFPEANSTDVVTVETTSVGMVARVNTTYRCISASPVIVGGATVTFSNVTMEAFMTGEDLSPNESVCTADQSFTTAPPPPPSTTTAAPAPVPTPPGTPSQGSYSVSNSNGTVCLLARMALQLNISHFSASQNKTIQEVVNLLPNQTTSSGSCDPTSATLVLTQANATNLSFLFTLNSTSNRYHLTGLSVVAAWSDMTAPFNTSNSSLDYQRGSLGRSYMCISEQTLVVDQNFSLNTFQLQVQPFGITRGQFAQAEECQLDQDNMLIPIVVGAALAGLVLIVLIAYLIGRKRSHAGYQTI

SEQ ID NO: 24 - protein, 247 aa, Oreochromis niloticus
MVQICRVQSWFVGVTPLLIFATVLHQGFATVAPPTPAPHKEPGRPERGYYNVTNHNGTICLMAYMGLQLNISYNSTSQKKVVQDVMNLQPNLTKHSGLCDSDIASLNLTVDAVKTNLTFVFTMNSTSNKYHLSEVTVSAAWPEMKEPVSVHNSSLDYLRGTVGYSYFCRDEQTLNVAQNLSINTFQLQVQPFAVKGDQFGAAEECQLDEDDMLIPIVVGAALAGLVVIVLLAYLIGRKRSHAGYQSI

SEQ ID NO: 25 - protein, 415 aa, Mus musculus
MCLSPVKGAKLILIFLFLGAVQSNALIVNLTDSKGTCLYAEWEMNFTITYETTNQTNKTITIAVPDKATHDGSSCGDDRNSAKIMIQFGFAVSWAVNFTKEASHYSIHDIVLSYNTSDSTVFPGAVAKGVHTVKNPENFKVPLDVIFKCNSVLTYNLTPVVQKYWGIHLQAFVQNGTVSKNEQVCEEDQTPTTVAPIIHTTAPSTTTTLTPTSTPTPTPTPTPTVGNYSIRNGNTTCLLATMGLQLNITEEKVPFIFNINPATTNFTGSCQPQSAQLRLNNSQIKYLDFIFAVKNEKRFYLKEVNVYMYLANGSAFNISNKNLSFWDAPLGSSYMCNKEQVLSVSRAFQINTFNLKVQPFNVTKGQYSTAQECSLDDDTILIPIIVGAGLSGLIIVIVIAYLIGRRKTYAGYQTL

SEQ ID NO: 26 - protein, 415 aa, Xenopus laevis
MGDTGAMERCACPAAVLLLSLVLMGATAFEVEIKDDKNATCIYAKLSVNITVQYETDTSSSKNITFPVPSDVTTNGSSCGSDGKAPLLVINFGNSQSWSLNFTRNNSTYSGSALIFTYNTNDTILFPDALRKGLISSTAMFLGPVPLNSTYKCISREVVVSENVTQIIYDVKLEAFMANGTLGKEIICDADKPSPVPSPTQPSTTASTAIPAPTSKPLDKPTMGNYTVSDASGICLLASMGLQINTSLLSEGKNIWRPFNIDPLGIKTNGTCTNQTGTLILTENRTIIEFTFALKNKNHFYLEEVNITLINGSAFSSRQNQNLSTWEASVDSSYMCHKEQQIKVSEDLFINAFDVRVQPFGVNNGTFATAEDCFADQNFIVPIVVGAALGVLVVLVMVAYFIGRRKQSSAGYEQM

SEQ ID NO: 27 - protein, 355 aa, Danio rerio
MAVRGFLPLLFILLSGIVHADDMMTSPLPSTAELKTANLPLVIQTTSSTTSTTTTSRPSSTSTHSTLTTEPAAKTTTARTTVTTSAPTSTQSTSSSSTSATVTTLAPTTTGHNTTNSTTEPPTTTGHNTTNSTTDAPTTTHTNATVAPTPPPTTPSVPKPTVGNYSVKTDNVSDCLLAKMGLQFSFKISGNASLQTVNLDPNVTKVNGTCGSGGSDSSLFLTSKDITVHFVFTNDSQKFRLHALTLTVDLGNGNIFNDSNTNLSLWEASVGSSYMCRKEQSYNISDKLTLNTFELQVQPFDVKKNSFSTAHECSLDDTSLLIPIIVGAALAGLIFIVVIAYVIGRRRTYVGYQTL

SEQ ID NO: 28 - protein, 411 aa, Papio anubis
MVCFRLFPVPGSGLVLVCLVLGAVQSYALELNLTDSGKATCLYAKWQMNFTVRYETTNKTYKTVTISDRGTVTYNGSICGDDQNGPKIAVQFGPGFSWIANFSKAASTYSIDSISFSYNTGDNTTFPDAEDKGIITVDELLAIKIPLNDLFRCNSLSTLEKNDVVQNYWDVLVQAFVQNGTVSTNEFLCDEDKTSTVAPTIHTTVPSPTTTPTPKEKPEAGTYSVNNGNDTCLLATMGLQLNITQDKVASVININPNTTHSTGSCRSHTALLRLNSSTIKYLDFVFAVKNENRFYLKEVNVSMYLVNGSVFSIANNNLSYWDAPLGSSYMCNKEQTVSVSGAFQINTFDLRVQPFNVTQGKYSTAEECSADSDLNFLIPVAVGVALGFLIIVVFISYMIGRRKSRTGYQSV

SEQ ID NO: 29 - protein, 410 aa, Macaca mulatta
MVCFRLFPVPGSGLVLVCLVLGAVQSYALELNLTDSGKATCLYAKWQMNFTVRYETTNKTYKTVTISDRGTVTYNGSICGDDQNGPKIAVQFGPGFSWIANFSKAASTYSIDSISFSYNTGDNTTFPDAEDKGIITVDELLAIKIPLNDLFRCNSLSTLEKNDVVQNYWDVLVQAFVQNGTVSTNEFLCDEDKTSTVAPTIHTTVPSPTTTPTPKEKPEAGTYSVNNGNETCLLATMGLQLNITQDKVASVININPNTTHSTGSCRSHTALLRLNSSTIKYLDFVFAVKNENRFYLKEVNVSMYLVNGSVFSIANNNLSYWDAPLGSSYMCNKEQTVSVSGAFQINTFDLRVQPFNVTQGKYSTAQDCSADDDNFLVPIAVGAALAGVLILVLLAYFIGLKRHHAGYEQF

SEQ ID NO: 30 - protein, 364 aa, Pan troglodytes
  SITE (200)..(200): Xaa can be any naturally occurring amino acid
MVCFRLFPVPGSGLVLVCLVLGAVRSHALELNEADSAINCSKCKTVTISDHGTVTYNGSICGDDQNGPKIAVQFGPGFSWIANFTKAASTYSIDSISFSYNTGDNTTFPDAEDKGILTVDELLAIKIPLNDLFRCNSLSTLEKNDVVQHYWDVLVQAFVQNGTVSTNEFLCDKDKTSTVAPTVHTTVPSPTTTPTRIPPXVASVININPNTTHSTGSCRSHTALLRLNSSTIKYLDFVFAVKNENRFYLKEVNISMYLVNGSVFSIANNNLSYWDAPLGSSYMCNKEQTVSVSGAFQINTFDLRVQPFNVTQGKYSTAEECSADSDLNFLIPVAVGVALGFLIIVVFISYMIGRRKSRTGYQSV

SEQ ID NO: 31 - protein, 411 aa, Canis lupus familiaris
MVCFRLSPAPGSGLVLLCLVLGAVSSYALEVNVTDSEKATCLYAKWQMNFTIQYNTTSKNFKTATISDFSTATYNGSVCGNDQNNPKIVVQFGSGFSWIVNFTKKESAYLIDSISFSYNLSDNATFPDAKEKGILTVHDLVGFRIPLNNIFRCNSLSTLEKNGVVQYYWDVHVQAFVQNGTVSTKEFLCEKDKTSTTVVPTISTTTPSPTTTPTPKEKPEVGSYSVNNSNGTCLLATMGLQLNITHNKVASVININPNTTDFTGSCQPQTALLRLNSSNIKYLDFVFAVKNENRFYLKEVNVSMYLVNGSVFSIANNNLSYWDAPLGSSYMCNKEQTVSVSGAFQINTFDLRVQPFNVMEGKYSTAQECSLDDDTILIPIIVGAGLSGLIIVIVIAYLIGRRKSYAGYQTL

SEQ ID NO: 32 - protein, 417 aa, Equus caballus
MVCFRLSPVPGSGLVLLCLVLGAVSSYALELNLTDSEKALCLYAKWQMNFTIPYETTSKSYKTVTISNFGTPTYNGSICGDNQNGSRIAVQFGSGFSWIVNFTKSVSVYSIDSISFSYNTGDNTTFPDAKDKGILTVNESVAFKIPLNDIFRCNSLSSLVKNGVVQNYWDVHVQAFVQNGTVSTNEYLCEKDNTTTTVAPIVPTTVPSPTTTSSPTTTPSPKEKPDVGSYLVKNGSDTCLLATMGLQLNVTHDKVASVININPNVTGYSGSCHPQTALLRLNSSNIKYLDFVFAVKNENRFYLKEVNVSMYLANGSVFSFANNNLSYWDAPLGSSYMCNKEQTVSVSGEFQINTFDLRVQPFNVKDGKYSTAQDCRADDDNFLVPIAVGAALAGVLILVLLAYFIGLKRHHAGYEQF

SEQ ID NO: 33 - protein, 407 aa, Bos taurus
MVCFRLAPVPGSGFLLLCLVLGAVSSYALELNLTDSSNATCLYAKWQMNFTIRYETTDKHNKTVPISDLGAATYNGSFCGDDQNGPKIAVQFGSGFSWIVNFTKEAASPSTYLVDTISFSYNTNDNKTFPDAKEKEVFTVNNRVALKIPLNDIFRCNSLSTLENRDVVQHYWDVHVQAFVQNGTVSTTEFLCDKDKTVTTAVPIVPTTLPSPTKPVVGSYSVVNSNGTCLLATMGLQLNITHDKVASVFNINPNTTNATGSCQPQTALLRLSSSNIKYLDFVFAVKNENRFYLKEVNVSMILVNGSVYSISNTNLSYWDAPLGSSYMCNKEQTVSVSGAFQINTFDLRVQPFSVTEGKYSTAQECSLDDDTILIPIIVGAGLSGLIIVIVIAYLIGRRKSYAGYQTL

SEQ ID NO: 34 - protein, 411 aa, Sus scrofa
MVCFRLSPVPGSGLLMLCLVLGAVSSYALELNLTNSEKATCLYAKWQMNFTIRYETTNNSHKTVSISDFGAATYNGSFCGDDHNDPQIVMQFGSGFSWIVNFAKESSSYLINSISFSYNTSDTTTFPDAKKKGVLTVNDSVGFQVPLNDIFRCNSLSTLEKDNVVQHYWDVHVQAFVQNGTVSTKEFLCDKDKTLTTTVPVIPTSVPSPTTTPTPKEKPETGSYSVTSSNGTCLLANMGLQLNITQDKVASVININPNTTNATGNCHSKTALLRLSGSNIKYLDFVFAVKNDNRFYLKEVNVSVYLVNGSVFSIANNNLSYWDAPLGSSYMCNKEQTVSVSGAFQINTFNLRVQPFSVMEGKYSTAQDCSADDDNFIVPIAVGAALAGVLILVLLAYFIGLKRHHAGYEQF

SEQ ID NO: 35 - protein, 408 aa, Ovis aries
MVCFRLAPVPGCGFLLFCLVLGTVSSYALELNLTDSSKATCLYAKWQMNFTIRYETTDKHNKTVTISDFDAAAYNGSVCGDDQNGPKIAVQFGSGFSWIVNFTKEASSTSTYLVDSISFSYNTNDNATFPDAKEKGVFTVNNRVALKIPLNDIFRCNSLSTLEKSDVVQHYWDVHVQAFVQNGTVSTTEFLCDKDKTVTTAMPIVPTTAPSPTKPVVGSYSVVNSNGTCLLATMGLQLNITHDKVASVFNINPNTTNATGSCQPQTALLRLSSSNIKYLDFVFAVKNENRFYLKEVNVSMILVNGSVYSISNTNLSYWDAPLGSSYMCNKEQTVSVSGALQINTFDLRVQPFSVTEGKYSTAEECSADSDLNFLIPVAVGVALGFLIIVVFISYMIGRRKSRTGYQSV

SEQ ID NO: 36 - protein, 411 aa, Rattus norvegicus
MRLLSPVTGSKLVLLFLFLGAVRSDALKLNLTDSKGTCLYAEWEMNFTITYEALKVNETVTITVPDKVTYNGSSCGDDKNGAKIMIQYGSTLSWAVNFTKEASQYFINNITLSYNTNDTKTFPGAVPKGILTVIIPVGSQLPLGVIFKCSSVLTFNLSPVVQHYWGIHLQAFVQNGTVSKHEQVCKEDKTATTVAPIIHTTVPSPTTTLTPTSIPVPTPTVGNYTISNGNATCLLATMGLQLNITEEKVPFIFNINPATTNFTGSCQPQTAQLRLNNSQIKYLDFIFAVKNEKRFYLKEVNVNMYLANGSAFHVSNNNLSFWDAPLGSSYMCNKEQVVSVSRTFQINTFNLKVQPFNVTKGEYSTAQDCSADEDNFLVPIAVGAALGGVLILVLLAYFIGLKRHHTGYEQF

SEQ ID NO: 37 - protein, 570 aa, Ornithorhynchus anatinus
MAMKNFTLQQERDTSVALIIRTYVRAFLKVYTKVPKPQRCHNQWQSLNIEGIEGIEIVKGSKWRSALETIITIQVKRKSQVQKYHPFSLHSECQKTNQEGTGGVATVIADECLLWPSIPFSTLAQKVNLGSCEAFSIIGYSVFALFIYLKPNMLDFIELAELMLSTETQLLEPTRVCCGICQSYALEINLTDSKNATCLYSKWQMTFTINYETTGNETKNVTVTVPENVTYDGSSCGDNQTVPQIAVQFGLGYSWHLNFTKKENNSYSFDTIVFTYNTSDNETFPEAKEKGQVLSVFEFRYARIPLNKIFRCHSEESLIGDKATHHYWETVVQAFIQNGTISKEEFICSKDRASTTVAPVTTQVVPSTTATPVPQDKPYPGKYAVKNGNDTCLLATMGLQLNVTQNKVNSVININPNVTDFTGSCSNETAELRLSGSNVKYIDFIFAVKNGNRFYLKEVNVSISFVNASDLNVANNNLSYWDAPLGSSYMCNKEQTLALADSLQINTFNLRVQPFSVVAGKYSTAEDCSADDDNFIVPIAVGAALGGLVILVLMAYFVGRKRRATGYEQF

SEQ ID NO: 38 - protein, 425 aa, Gallus gallus
MAPPRCPAGLALLLLLLGACGFFQSYAVEVDVKDASNFTCLYAQWMMKFLIKYETNSSDYKNASLDLTSTVTHNGSICGSDTQAALLAVQFGDGHSWSINFTKNNETYRAEFITFTYNTNDTAVFPDARRQGPVTIVVKDAMHPIQLNNVFVCHHTTSLEAENVTQIFWNVTMQPFVQNGTISKKESRCYADTPTAAPTVLPTVANVTTASTTISPAPTTAPKPAENPVTGNYSLKTGNKTCLLATVGLQLNISQDKPLLINIDPKTTHADGTCGNTSATLKLNDGNRTLIDFTFIVNASASVQKFYLREVNVTLLNYQNGSVILSADNNNLSKWDASLGNSYMCRKEQTLEINENLQVHTFNLWVQPFLVKENKFSIAEECFADSDLNFLIPVAVGMALGFLIILVFISYIIGRRKSRTGYQSV

SEQ ID NO: 39 - protein, 556 aa, Taeniopygia guttata
MECREGEVTRCKQKNNLFSGINDDISGAKQAKQRQCTPQKPPKRATATLPLQRPPRGIPGPAPAAVAAAVAADRITPSGSHQTRPPEAARDERPVRDPRNRAAAPSGHWRRAGGPQRHRHHRHRRHGPAPLRRLLLRPPPPAAAAARFLGFFQSYAVEVDIKDASNATCLYADWMMRFLIKYESNSGDYKTTTLNLSSSVTHNGSVCGNDTQAALVAVQFGEGHSWSINITKNNETYQGDFITLTYNTNDTAVFPDAKRKGPITVLVRDPSRPIQLNTVFVCHNSFVIEAENTTQIFWNVTMQAFVQNGTVSKKESRCPADTPTSEPTVPPTIANVTTASTTTLSPAPTTAPKPVENPVTGNYSLKSGNKTCFLATVGLQLNVSQEKPLLININPKTTVADGACGNTTATLKLNDGNSTLIGFTFAVKNTSASVQKFYLREVNVTLLNRLNGSVISSADNSNLSKWDAFLGSSYMCRKEQTLQINENVQVHTFNLWIQPFLVEANKFATAEECIADSDLNFLIPIAVGVALGFLIILVFISYIIGRRKSRTGYQSV

SEQ ID NO: 40 - protein, 408 aa, Xenopus tropicalis
MERCACPAALLLLSLVLMGAMAFDVEIKDDKNATCIYAKLSVNVTVQYETNTSSTKNVTFSVPSEVTTNGSSCGSNGKAPILVINFGNGHSWSLNFTRNDSMYSGGALIFTYNTNDSTLFPDALKEGLISSTAAFLGPIPLNSTYKCISSEVVVSENVTQIISDVKLEAFMQNGTLGKEVSCDADKPSPTPTTNPSTTASTTTPTPTSKPLDNPTTGNYSVSDVNGTCLLASMGLQINTSLLSEGKNIWTAFNIDPTAMSKNGTCSNQTGTLILTDNSTVIEFTLALKNKNHFYLKEVNVALINGSASSTRQNQNLSAWEASVGSSYMCHKEQQIKVSEDLVINSFDVRVQLFGVKNETFATAQQCSLDDDSIVIPIVVGAALAGLIVIIVIAYLIGRRKGYSGYQTL

SEQ ID NO: 41 - protein, 404 aa, Salmo salar
MFRCAFLILFLALGNELHLSHGTEVSVNNTENKLCLYANLMVNFSVTYEVGVNKNETVIFVLPENVTTEGSTCDNTTSTLKLSFGHGHSWTVEFTKKNKTYQVDTIVFSYNLNDSSVFPNSTSKETKFVTVKSIITNVSVDTYYSCKSENVLTVESVIQTLYDVALQAFVINGSKSDTDTVCSADMTSTTVAPTTTVTSTAAPTSTPTLPTPTTGKYSIAPDVNSTACLMATFGLQIGYKQGDKEETINLVPNITEVGGACGANSSDLILTSDTITIMFTFSNDGKKFHLHALKVTVKPATGDPVIAVNNNMSIWAAAVGSSYMCNKEQTLNVTDTLTLYTFELRVQPFEVNKGEFATAHECSLDDTSILIPIIVGAALAGLILIVVIAYVIGRRKTYVGYQTL

SEQ ID NO: 42 - protein, 410 aa, Oreochromis niloticus
MKVSHATAGLVVWFVVLGCIDAVTLEVKESNTTCIKADLSASFSIIYNTTHAERTVQVLLPNSTTVDTANSTCGKDGSSPRLVAVFGSGYTLGLNFSTNGTLYQVSSLTLQYNLSDTSVFPNATISGVVTLVSASVGIEANVNTTYKCASPTVIDVATAKVNFTDMRLEAYMPGNELSPNETVCFADQTSTTPSPTTVSTTAVPTQTPPGTPQQGNYTVKDANDTICLLAKMGLQLNVSYTSQNKTVQDVLNLNPNVTNSTGSCGASSATLVLTQTQSTILTFNFTLNSTTNKYHLSGVTLIANWFDSAHFSMSNNSLNYLRSTLGYSYMCNAEQTLFVTPSFSLNTFDLQVQPFGVKSGRFATAEECQMDQNQMIIPIIVGAALAGLVLITLIAYLIGKRRSHAGYQAI

SEQ ID NO: 43 - protein, 249 aa, Takifugu rubripes
MTQIGGVQPVFLAVTVHLILATVLHQTFATVTPPVTTAVPHKEPGRPDQGDYQVTSSNGTVCFLASMGLQLNITFNSTSQNKTLQEVINIQPNRTKSSGSCDTSSALLTLTTDAEKTNLTFVFALNTTSNKYHLSEVSLSAALSDMKETFVAQNHSLDYLRGTLGFSYMCRERQTLGVTPDFAINTFQVQVQPFGVTGKQFAAAEECQLDKDDMLIPIIVGAALAALVLIVLSAYLIGRKRSHAGYQSI

SEQ ID NO: 44 - protein, 418 aa, Pan troglodytes
MPRQLSAAAALFASLAVILHDGSQMRAKAFPETRDYSQPSAAATVQDIKKPVQQPAKQAPHQTLAARFMDGHITFQTAATVKTPTTTPATTKNTATTSPITYTLVTTQATPNNSHTAPPVTEVTVGPSLVPYSLPPTITPPAHTTGTSSSTVSHTTGNTTQPSNQTTLPATLSIALHKSTTGQKPVQPTHAPGTTAAAHNTTRTAAPASTVPGPTLAPQPSSVKTGIYQVLNGSRLCIKAEMGIQLIVQDKESVSWGHRTITLSSKSLSGGCLARNEHSPHPLFLFFEKGPPSVTQAEDEESYYISEVGAYLTVSDPETIYQGIKHAVVMFQTAVGHSFKCVSEQSLQLSAHLQLKTTDVQLQAFDFEDDHFGNVDECSSDYTIVLPVIGAIVVGLCLMGMGVYKIRLRCQSSGYQRI

SEQ ID NO: 45 - protein, 416 aa, Papio anubis
MPRQLSAAAVLFASLAVILHDGSQMRAKAFPKTRDYSQPTAAATGQDIAKPVQQPANQAPHQTLAARLMDGHITFQTAATIKTPTTTPVTTKNTPTTSPIIYTLVTTQATSNNSHTAPPLTKVTVGPSLAPYSLPPTITPPAHTTGTSSSTVNHTTGNATQPSNQTTLPATLSIALHKSTTGQKPVQPTHAPGTTAAAHNTTRTAAPASTVPGSTLAPQPSSVKTGIYQVLNGSRLCIKAEMGIQLIVQDKESVFSPRRYFNLDPNATQASGNCGTRNSNLLLNFQGGFVNLTFTKDEGSYYISEVGACLTVSDPETIYQGMKHAVVMFQTAVGHSFKCVSEQSLQLSAHLQLKTTNVQLQAFDFEDDHFGNVDECSSDYTIVLPVIGAIVVGLCLVGIGVYKIRLRCQSSGYQRI

SEQ ID NO: 46 - protein, 416 aa, Macaca mulatta
MPRQLSAAAVLFASLAVILHDGSQMRAKAFPKTRDYSQPTAAATGQDIAKPVQQPANQAPHQTLAARLMDGHITFQTAATIKTPTTTPVTTKNTPTTSPIIYTLVTTQATSNNSHTAPPLTKVTVGPSLAPYSLPPTITPPAHTTGTSSSTVNHTTGNATQPSNQTTLPATLSIAPHKSTTGQKPVQPTHAPGTTAAAHNTTRTAAPASTVPGSTLAPQPSSIKTGIYQVLNGSRLCIKAEMGIQLIVQDKESVFSPRRYFNLDPNATQASGNCGTRNSNLLLNFQGGFVNLTFTKDEGSYYISEVGACLTVSDPETIYQGMKHAVVMFQTVVGHSFKCVSEQSLQLSAHLQLKTTNVQLQAFDFEDDHFGNVDECSSDYTIVLPVIGAIVVGLCLVGMGVYKIRLRCQSSGYQRI

SEQ ID NO: 47 - protein, 428 aa, Canis lupus familiaris
MSWQLSAAVALFVSLALILHYGSQIRAKMFPETVDFQPTTAATVRATAKPFLHLTNQVPSQTLAARSMDGHIASQRAATTSSSEPPTTHTTVKTLVTTSLVTANSTPSSSPIIYTLVTTIVTPNNSNTAAPVTEATIGPSADPGSLPTTSTPLAHTTRTNPSTLSHKTRKTTHFGNQTTLPATLSTSTHKSTSSHKSAQSTHAPGPTTAAHNTTQTASPATPASGPTLAPQPSSPKTGIYQVLNGSRLCIKAEMGIELMVQDTKSVFSPQRYFNIDPNATQTSGNCGSQKSNLLLNFQGGFVNLTFLKDENSYYINEVGAYLAVSNPEKIYQGMKSSVVMFETGVGHSFKCVSEQSIQLSTHLQLKTMNVQFQAFDFEDDHFGNVDECSSDYTVVLPVIGAIVLGLCAVGLIVYGIHLRRESSGYQRI

SEQ ID NO: 48 - protein, 430 aa, Sus scrofa
MSWRLSAVLVSFVSLAVFLHYGHHMKAKVFPEITDSSSPTTAATVQATAEPSLWKPTNHTPHKTLAAKSTDGHVTSQIATTVTDSETLTTHTTITTLAATSLAATNSTPSTSPTTHTLFTTLATPNTSHMAAPVTEAAISPSAGLSSLLPTIIPPAHTTGTRSSTLSPTAGKTTQPSNQTTLPATLSTSPHNSTASQKPTHPNHTPGPTTGAHNTTQTASPATIAPGPTLAPQPSSAKTGIYQVLNGSKLCIKAEMGIELTVQDTQSVFSPQRYFNIDPNTTQASGNCGSRKSKLLLNFQGGFVNLTFTKDENSYYVSGVGAYLTVSNPEKVYQGMKNAVVMFETMIGHSFKCVSEQSIQLSPHLQLNTMNVQLQAFDFEDDHFGNVDECSSDYTIVLPVIGAIVLGLCAVGLIVYGIRLKRESSEYQRI

SEQ ID NO: 49 - protein, 259 aa, Danio rerio
MTQSSRSVLLLMLSSLHCLGSSLESNPKDPSVLAEAPGQNKRDSDISLVPQMPVLQPKETAPPLVTYTIRNPQGKVCVRASFGVEFVVRENKKKYYFNLTPNSARATGYCANQKTVLSLEFSGGNLEFTFIKDGDQSYVKTVKGSLRAAPPCKNCPSKIYVGLVDNEKLFKAKNGLSFNCKSETMLILADYFRLKLVPLQIQAFDLVNGAFGKEVECWADYNKRMIPIILGAVAAAICLIAILTYVLVREHRNQGYEQL

SEQ ID NO: 50 - protein, 432 aa, Equus caballus
MAWQLSAVVVLFVSLAVILYYGSHVRANVFPEITDYSQPTTAATIQTRAQPSLSQPTNQVPHKTLATRSMDGQVTSQTAATTVNPETPVTHTTIKTAAATSLVTTNSTLSTSPITNTLLTTLATPDNTHTTTPVTEATIGPSAGPGSPPTTITTTSSAYTTGTRSSTVSHTTGKTTQLSNQTTLPATLSTSPHNSTTSQNPAHSTHTPGPTTGTCNTTQTASPTTTAPGPTLAPQPSSAKTGMYQILNGSKLCIKAEMGIQLTVQDTKSASPPQGYFNIDPNTTQVSGICGSRKSNLLLNFWGGFVNLTFTKDENSYYISEVGAYLTVSNPEKTYQGMKSPVVMFETVIGHSFKCVSEQSLELSTQLHLKTTNVQLQAFDFEDDNFGNVDECSSDYTVVLPVIGAIVLGLFAVGLIVYGVRVRREASGYQRI

SEQ ID NO: 51 - protein, 433 aa, Bos taurus
MSWQIPAVVMSFMALVAIWYYDSHYNSHMQAKVFPEITGYSSPTTGQATVKPSLLQPTNYVPHKTAAARSTDGHVTSQTVAKTSSSETLTTNTTIDVLATTSPVTTKSTLPTTPTTHTLVTTLATPNKSHVTFPVTEAKVGLSVGPSSPPVTVNPTAHTTGNRPSTASHTTGKTTQLSNQTTLPATLSTSPHNITTSQKPTQPTHTPGPTTATYNTTQTASPATIAPRPTLAPQPLSPKTGIYQVHNGSKLCIKAEMGIQLTVQDSVSVFSPQKYFNIDPNATQASGNCGSRKSNLLLNFQGGFVNLTFTKGEKSYYISEVEAYLTVSNPAKVYQGLKHAMMMFETVVGHSFKCVSEQSIQLSTYLQLKTMNVQLQAFDFEDDHFGNADECISDRNRREIPVAVGLSIAVLLAVLLTACLVTRKRPSRGYERM

SEQ ID NO: 52 - protein, 429 aa, Ovis aries
MSWQISAVVLFFVSLAVIWYYDSHMKANVFPEITGYSSPTTGQATVKPSLLQPTNHVPCNTAAAKSTDGHVTSQTVAKTSSPETLTTNTTIEVLVTTSPVTTQSTLPTTPTTHTLVTTLATPSKSHVTFPVTEAKAGLSIGPSSPPVTINPAAHTTGNRPSTASHTTGKTTQLSNQTTLPATLSTSPHNITTSQKPTQPTHTPGPTTAANNTTHTASPATIAPRPTLAPQPLSPKTGLYQVLNGSKLCIKAEMGIQLTVQDSVSVFSPQKYFNIDPNATQASGNCGSRKSNLLLNFQGGFVNLTFIKDENSYYISEVEAYLTVSNPAKVYQGMKYAMMMFETVVGHSFKCVSEQSIQLSNHLQLKTVNVQLQAFDFEDDRFGNADECISDRNRREIPVAVGLSIAVLLAVLLTACLVTRKRPSRGYERM

SEQ ID NO: 53 - protein, 408 aa, Rattus norvegicus
MPGQTSAVAVLLCLAVILHGYQIREKEFPEARGYLQYTATTTEQITAKPPLPLTNQTSHATLASRSKDDYIQTAAETSTFEDTAHITMKTAIPVTTKSLLPISSTSYTFVRTNNSHMTASSTEDTIGSGSITHLPFPTTRASLAAVNHITGRSTQLGGQTTLPKALFTPSHESTTTQRPTLSTIVSELTPTGKDRSTTSSVPLVPRPTFVTWSSPAKIGTYEVLNGSRLCIKAEMGIALIVQEKGLDSATQRHFNIDPSLTHASGKCGSQNSNLFLNFQGGSVNVTFTKEENLYYVSEVGAYLTISNTEKTYQGKSTMMMFETVVGHSFKCVSEQSIQLSAQLQMKTMNIHLQAFDFEGDSFGIVDECLSDYTVVLPVVGIIVVVLCVVGLGIYKIRQRRQSSAYQRI

SEQ ID NO: 54 - protein, 411 aa, Mus musculus
MPGQISAVAVLFLSLTVILHGYQIREKEFPKARGYLQYTATSAEQITTKPLLQLINQRSHITLASRFKDDYIQMAAETSAIENTAHITMKTVTPVTTKSLPPISSASYTFVRSNNAHMTASSTDDTIGSGSIAHLPVPTTRASLAIVNYITGRATQLGGQTTLPKTFFTASHKSTTNQRPTLSTNVLGTSTPTHKDRSTTSPVPLVPRPTLVTWSSPAKIGTYEVLNGSRLCIKAEMGLALIVQEKDLDSATQRYFNIDPSLTHASGKCDSQKSNLFLNFQGGSVNITFTKEENLYYISEVGAYLTISNTEKTYQGKKNTLMMFETVVGHSFKCVSEQSIQLSAQLQMKTMNIHLQAFDFEGDSFGNVNECLSDYTVVLPMVAIIVVVICVVGLSVYKIRQRHQSSAYQRI

SEQ ID NO: 55 - protein, 314 aa, Xenopus tropicalis
MDRVSLLSTILLLYGLLYINDAYSENTFAQPSNTTTPAPNTTTTHVTSNTTTLAPNTTTTHVTSNTTTLAPNTTTTHITSNTTTLAPNTTTTLAPNTTTTHSVTTTKTASTTTPTPTLEPKPSPPETGNYTVKIKNEFCIEALMGLELELTNSTKTQQYFNIVPSQINSNGTCEKSKANLNLTFANSYINFVFAQDDNSYYLDNVTVYFNLTRSESWYGNATNQKLLKTENGYSVKCKNTPKIQLGDTMNLVMTNVKLQVFNFKDNSFGKETTCKYDHNFGLMIAGIVIVVIVVLGVIIYFIWHKRKSSGYQRI

SEQ ID NO: 56 - protein, 478 aa, Pan troglodytes
MGRCCFYTAGTLSLLLLVTSVTLLVARVFQKAVDQSIEKKIVLRNGTEAFDSWEKPPLPVYTQFYFFNVTNPEEILRGETPRVEEVGPYTYRELRNKANIQFGDNGTTISAVSNKAYVFERDQSVGDPKIDLIRTLNIPVLTVIEWSQVRFLREIIEAMLKAYQQKLFVTHTVDELLWGYKDEILSLIHVFRPDISPYFGLFYEKNGTNDGDYVFLTGEDSYLNFTKIVEWNGKTSLDWWITDKCNMINGTDGDSFHPLITKDEVLYVFPSDFCRSVYITFSDYESVQGLPAFRYKVPAEILANTSDNAGFCIPEGNCLGSGVLNVSICKNGAPIIMSFPHFYQADERFVSAIEGMHPNKEDHETFVDINPLTGIILKAAKRFQINIYVKKLDDFVETGDIRTMVFPVMYLNESVHIDKETASRLKSMINTTLIITNIPYIIMALGVFFGLVFTWLACKGQGSMDEGTADERAPLIRT

SEQ ID NO: 57 - protein, 478 aa, Macaca mulatta
MGRCCFYTAGTLSLLLLVTSVTLLVARVFQKAVDQSIEKKIVLRNGTEAFDSWEKPPLPVYTQFYFFNVTNPEEILRGETPRVEEVGPYTYRELRNKANVQFGDNGTTISAVSNKAYVFERDQSVGDPKIDLIRTLNIPVLTVIEWSQVHFLREIIEAMLKAYQQKLFVTHTVDELLWGYKDEILSLIHVFRPDISPYFGLFYEKNGTNDGDYVFLTGEDNYLNFTKIVEWNGKTSLDWWITDKCNMINGTDGDSFHPLITKDEVLYVFPSDFCRSVYITFSDYESVQGLPAFRYKVPAEILANTSDNAGFCIPEGNCLGSGVLNVSICKNGAPIIMSFPHFYQADERFVSAIEGMHPNKEDHETFVDINPLTGIILKAAKRFQINIYVKKLDDFVETGDIRTMVFPVMYLNESVLIDKETASRLKSVINTTLIITNIPYIIMALGVFFGFVFTWLACKGQGSMDEGTADERAPLIRT

SEQ ID NO: 58 - protein, 478 aa, Canis lupus familiaris
MGRCCFYTVGTLSLLLLVTSIALLVARVFQKAVDQTIEKNIVLRNGSETFDSWKKPPLPVYAQFYFFNVTNPEEILRGEIPRLEEVGPYTYRELRDKADIQFGDNGTTISAVSNKAYVFERNQSVGDPKTDLIRTLNIPAVTAMEWAHLHFFRELIEALLKAYQQTLFVTHTVDELLWGYKDEILSLINVFKPEISPYFGLYYGKNGTNDGDYVFLTGEDNYLNFSKIVEWNGKTSLDWWTTDKCNMINGTDGDSFHPLIDKDEILYVFPSEFCRSVYITFSDFKSVQGLPAFRYKVPGEVLANTSDNAGFCVPKGNCLGSGVLNISICKNGAPIIISFPHFYEADKKFVSAIDGMRPNKDYHETFVDINPLTGIILRAAKRFQINVYVKKLDDFIETGNIRTMVFPVMYINESVLIDKDTASRLKSVINTTLIITNIPYIVMALGVFFGLIFTWLACRGQGSMDEGTPDERAPLIRT

SEQ ID NO: 59 - protein, 478 aa, Bos taurus
MGRCCFYAVGTLSLLLLVTSITLLVARVFQKAVDQTIEKNIVLRNGSETFDSWKKPPLPVYTQFYFFNVTNPEEILNGETPRLEEVGPYTYRELRNKDDIQFGDNGTTISAVSNKAYVFERDKSVGDPKIDLLRTLNIPALTAMEWTQLPLLRDIIEALLKAYRQKLFVTHTVDELLWGYKDEILSLINTFKHDVSPYFGLFYGKNGTNDGDYVFLTGEDNYLNFSKIVEWNGKTSLDWWTADECNMINGTDGDTFHPLITRDEVLYVFPSDFCRSVYITFSDFESVQGLPALRYKVPAEILANTSDNAGFCIPKGNCLGSGVLNVSVCKNGAPIIMSFPHFYQADEKFVSAIGGMHPNKEYHETFVDINPLTGIILRAAKRFQINVYVRKLDDFVETGNIQTLVFPVMYINESVLIDKETASRLKSVINTTLIVTNIPYIIMALGVFFGLIFTWLACRGQGSTDEGTADERAPLIRT

SEQ ID NO: 60 - protein, 478 aa, Mus musculus
MGRCCFYTAGTLSLLLLVTSVTLLVARVFQKAVDQTIEKNMVLQNGTKVFNSWEKPPLPVYIQFYFFNVTNPEEILQGEIPLLEEVGPYTYRELRNKANIQFGENGTTISAVTNKAYVFERNQSVGDPNVDLIRTINIPLLTVVDLAQLTLLRELIEAMLKAYQQKLFVIHTVHELLWGYKDEILSLVHIFKPDVSPNFGLFYERNGTNDGEYVFLTGEDNYLNFSKIVEWNGKTSLDWWTTDTCNMINGTDGDSFHPLISKDEVLYLFPSDLCRSVHITFSSFENVEGLPAFRYKVPAEILANTSENAGFCIPEGNCMDSGVLNISICKNGAPIIMSFPHFYQADEKFVSAIKGMHPNKEEHESFVDINPLTGIILRGAKRFQINTYVRKLDDFVETGDIRTMVFPVMYLNESVLIDKETANQLKSVINTTLVVTNIPYIIMALGVFFGLVFTWLACRGQGSMDEGTADERAPLIRT

SEQ ID NO: 61 - protein, 531 aa, Danio rerio
MTRRSCTIYATGIVCAHLLILGIALLLAQVFQTMIQERIKKEITLAENSRVLDGWINPPPPVYMQYFFFNVTNPDEFLAGKEKAKVTQMGPYTYREYRPRENVTYLENGTKIFATNPKSFVFLRNMSAGDPEVDRVTTVNIPMIAVMNELNSYSFFVRTAVSMYMGSMGMGLFMNRTVHEILWGFKDPLLTKLHAMRPEVDEHFGLMYNKNGTHEGEFVFHTGEKNYMNYGKIDTWNGISQMNWWSSNQSNMINGTDGSVFHTFLSRKELLYIFAADLCRSIHLGYVRDMEVKGIPAFRFAPPSDVLAPPDENPANAGFCVPAGDCLGKGVLKVSVCRQGAPIVVSFPHFYQADERYINAIEGMNPNEEEHETYLDINPTTGVPIRACKRAQLNIILKRVRGFPNTKFLNETIFPIMYVNETATIDDESAAQMRMLLLIVTVVSNFPVIILALGVILLVVLIFLVCRNRQRKNEVKRIDFTEAFHSFATTKDETAYTQVSNQAEDSPENRNNQPLRNGSYIAMSPVEAQKC

SEQ ID NO: 62 - protein, 478 aa, Rattus norvegicus
MARCCFYTAGTLSLLLLVTSVTLLVARVFQKAVDQTIEKNMVLQNGTKVFDSWEKPPLPVYIQFYFFNVTNPEEILQGEIPLLEEVGPYTYRELRNKANVQFGENGTTISAVTNKAYIFERNQSVGDPTVDLIRTINIPLLTVVEMAQQPFLREIIEAMLKAYQQTLFVTHTVHELLWGYKDEVLSLVHIFRPDVSPNFGLFYERNGTNDGEYVFLTGEDNYLNFTKIVEWNGKTSLDWWTTDTCNMINGTDGDSFHPLISKDETLYIFPSDFCRSVYITFSSFENVEGLPAFRYKVPAEILANSSENAGFCIPEGNCMDAGVLNVSICKNGAPIIMSFPHFYQADEKFVSAIKGMRPNKEEHESFVDINPLTGIILRGAKRFQINTYVKKLDDFVETGNIRTMVFPVMYLNESVLIDKETASQLKSVINTTLIVTNIPYIIMALGVFFGLIFTWLACRGQGSTDEGTADERAPLIRT

SEQ ID NO: 63 - protein, 481 aa, Gallus gallus
MRSLCLVTVGVLALTLLIASISLLVAHVFQTVVDLQVKQGTVLKNGTETFEAWEDPPPPVYMQFYFFNVTNPLEVLQGATPLVEEKGPYTYREYRPRVHVQFLDNGTKVSALNPKTYVFEPEKSVGNPEVDLIRTINVPAVTAMEWTRATSLQFATEVLLLLYQESLFTVRTVHELLWGYKDKLLSTIHVLHPEIDPVFGFFNKMNGTDDGEYVFLSGEMNYLNFSRIVEWKGKESLNWWTTKTCNMINGTDGTSFHPLISKDENIYIFSSDFCRSLYLVYDSSGSVAGVPTYRFVPSPMVFANTTVNPDNAGFCVPPGNCPGAGVLNVSICKQGAPIFLSAPHFYQADQKFVSDIEGMHPTKEYHETFVDINPLTGLVLQAAKRMQINIHVRKLPEFFETGNIRTLIFPVMYINESVLIDEASANKLKHVLLEASVVTGIPFVIMAIGIVFGIVFSVLVCRAQGAREESTEEERSPLIRT

SEQ ID NO: 64 - protein, 483 aa, Xenopus tropicalis
MVKWAVFGTAAVSVTLLIVSIVLLLTHTFMDIVEGQVKQAIVLKNESEVFEDWANPPPPVYMQFYFFNVTNPLEVLSGEKPFVDEIGPYTYREYRPRENITFSVNGTEVSAVTPKTYVFEPEKSIGDPKVDLIRTVNIPLVTILEMTKDSSLLRPFIIAALKTYKEGMFVTRTVDELLWGYKDAVLSILHPFKKNISDTFGLFYKMNTTDDGEYIFLSGEKDYLEFTQIAEWKGQKALNWWTTETCNMINGTDGTSFHPLLNKDDTIYMFSSDLCRSIYAVYESSENIKDISVFRFSPPASVFANVSVNPQNKGFCVPEGNCLPSGLLNVSICKEGAPIVLSSPHFYQADENVINSIRGMKPVKEHHMTFLDLNPLTGTLIQAAKRIQVNVYVRKINVYLITQDIQTLFFPVMHLNESVLIDDKSAGRLRSILFQGRVVANIPFIIMGLGIILAFLFTTLSCLQKRSRDEGTEEERGPLIRAS

SEQ ID NO: 65 - protein, 551 aa, Drosophila melanogaster
MQLDDILHINNCKADCSSLSTTPNPKTDLVNMNGPKHKFCTKLSSTYLRKWWITIVVAAALIIGGIVVACEFTVLIDAVVDRMVALRPGAKTFGWWAKPPVEPRISLYIYNVTNADDFLSNGSKAIVDEVGPYVYSETWEKVNIVENDNGTLSYNLRKIYSFREDLSVGPEDDVVIVPNIPMLSATSQSKHAARFLRLAMASIMDILKIKPFVQVSVGQLLWGYEDPLLKLAKDVVPKEQKLPYEEFGLLYGKNGTSSDRVTVNTGVDDIRRYGIIDNFNGRTHLPHWTTDACNTLAGTDGSIFPPHIDHDRILHVYDKDLCRLLPLVFEKEVMTSNEVPGYRFTPPEWVFADVDSHPDNMCFCPAGKPSCSPNGLFNVSLCQYDSPIMLSFPHFYLADESLRTQVEGISPPMKEKHQFFFDVQPKMGTTLRVRARIQINLAVSQVFDIKQVANFPDIIFPILWFEEGIDNLPDEVTDLMRFAEQVPPKIRVALIVGLCALGVILLLLSTFCLIRNSHRQSTLHLEGSNYLATAQVDMNKKQNKDNQPARY

SEQ ID NO: 66 - protein, 522 aa, Anopheles gambiae str. PEST
MYGRSNRLCAKLSSAFLRKWWFVIAFALSLLVLGALVTFGFTAFIRTIIDHQVALRVGGQSFGWWSRPPVEPIIRIFVYNVTNADEFLNNGTKPILDELGPYVYVQTWEKVNIKENPNGTISYNQKRVYIFNEDLSGGLEDDVVIVPNIPMLSATSQSKHAARFLRLAMASIMDILKIKPFVEVSVGQLLWGYEDPLLKLAKDVVPKEQKLPYEEFGLMYGKNSTSKDTVTVWTGVDDITQYGIIDKYNGRSHQTHWLSEQCNRLNGTDGSIFPPRITKNSTLHVYEKDLCRLLPLSFEKEVTVRGGVKGYRFTPSPDVFASVDKNPNNMCYCPAGPPCAPHGLFNVSLCQYDSPILLSFPHFYMADQTLRTAVEGISPPEKDKHQLFIDVQPDMGTALRARARIQINLAVSQVVDIKQVANFPDIVFPILWFEEGIDSLPDEILDLMKVATNIPPRAKFILTIALFGLGGFLFVVAVICLVRKSHRQSTLHLEGSNYLATASVDQAKKKAKMDNGMSSKSN

SEQ ID NO: 67 - protein, 338 aa, Homo sapiens
MVRRVQPDRKQLPLVLLRLLCLLPTGLPVRSVDFNRGTDNITVRQGDTAILRCVVEDKNSKVAWLNRSGIIFAGHDKWSLDPRVELEKRHSLEYSLRIQKVDVYDEGSYTCSVQTQHEPKTSQVYLIVQVPPKISNISSDVTVNEGSNVTLVCMANGRPEPVITWRHLTPTGREFEGEEEYLEILGITREQSGKYECKAANEVSSADVKQVKVTVNYPPTITESKSNEATTGRQASLKCEASAVPAPDFEWYRDDTRINSANGLEIKSTEGQSSLTVTNVTEEHYGNYTCVAANKLGVTNASLVLFRPGSVRGINGSISLAVPLWLLAASLLCLLSKC

SEQ ID NO: 68 - protein, 338 aa, Pan troglodytes; identical to SEQ ID NO: 67

SEQ ID NO: 69 - protein, 338 aa, Oryctolagus cuniculus
MGARVQPDRKQLPLVLLRLLCLLPTGLPVRSVDFNRGTDNITVRQGDTAILRCVVEDKNSKVAWLNRSGIIFAGHDKWSLDPRVELEKRHSLEYSLRIQKVDVYDEGSYTCSVQTQHEPKTSQVYLIVQVPPKISNISSDVTVNEGSNVTLVCMANGRPEPVITWRHLTPTGREFEGEEEYLEILGITREQSGKYECKAANEVSSADVKQVKVTVNYPPTITESKSNEATTGRQASLKCEASAVPAPDFEWYRDDTRINSANGLEIKSTEGQSSLTVTNVTEEHYGNYTCVAANKLGVTNASLVLFRPGSVRGINGSISLAVPLWLLAASLLCLLSKC

SEQ ID NO: 70 - protein, 341 aa, Mus musculus
MVGRVQPDRKQLPLVLLRLLCLLPTGLPVRSVDFNRGTDNITVRQGDTAILRCVVEDKNSKVAWLNRSGIIFAGHDKWSLDPRVELEKRHALEYSLRIQKVDVYDEGSYTCSVQTQHEPKTSQVYLIVQVPPKISNISSDVTVNEGSNVTLVCMANGRPEPVITWRHLTPLGREFEGEEEYLEILGITREQSGKYECKAANEVSSADVKQVKVTVNYPPTITESKSNEATTGRQASLKCEASAVPAPDFEWYRDDTRINSANGLEIKSTEGQSSLTVTNVTEEHYGNYTCVAANKLGVTNASLVLFSKYAKTEPDSMQVIEFLHIDLKSIRHPLKVNPIQK

SEQ ID NO: 71 - protein, 337 aa, Xenopus laevis
MVGRSQSDRNQLPLFLLRLLCLLPTGLPVRSGDFNRSTDNMTVRQGDTAILRCFVEDKSSKVAWLNRSGIIFAVDDKWSLDPRVELEKRSPFEYSLRIQKVDVSDEGPYICSVQTNQHTKTMQVYLIVQVPPKISNISADITVNEGSNVTLMCIAYGRPEPMITWRHLTPTARDFEGEEEFLEIQGITREQSGRYECKAANEVASADVKQVRVTVNYPPIITESNSNEATTGKQAILRCEASAVPAPDFEWYKDDTRINSAQGLEIRNTGSRSVLMVANVTEEHYGNYTCVAANKLGITNTSLYLYIGPGTPIDNATSLAASLWLMANILLCLFCTC

SEQ ID NO: 72 - protein, 333 aa, Danio rerio
MSCLWIHSVFIPGFFLLFGFEGFPVISVESQRSTDNITIRQGDTTVIRCYVDDKVSKVAWLNRSNIIFAGEDKWSLDPRVELVTQGQLEYSLRIQKVDVFDEGPYTCSIQTKQQSKTSQVYLIVQVPAIIYKVSEDITVNEGSNVALTCLANGRPDPAITWRLLNPSAEALDVGEYLEISGVVRSQAGRYECKASNDVSTPDVKYVNVVVNYPPYIKDVRSSETAVGQAGVLHCEASAVPQPEFEWYRDERRLSSSQSLTIQVSGSRTVLVVANVTEEDYGNYTCVATNRLGVHNASVFLYKPGMGRDINSAGCICQSLWLLLLCVSSALLQC

SEQ ID NO: 73 - protein, 197 aa, Mus musculus
MSGSSRRLLWAATCLAVLCVSAAQPNITTLAPNVTEVPTTTTKVVPTTQMPTVLPETCASFNSCVSCVNATFTNNITCFWLHCQEANKTYCANEPLSNCSQVNRTDLCSVIPPTTPVPTNSTAKPTTRPSSPTPTPSVVTSAGTTNTTLTPTSQPERKSTFDAASFIGGIVLVLGVQAVIFFLYKFCKSKERNYHTL

SEQ ID NO: 74 - protein, 197 aa, Macaca mulatta
MSRLSRSLLWAVTCLAVLCVLSAEENPTPHTNVTSLAPTSNITSAPVTSLPLVTTPAPETCEGRNSCVSCFNASTVNTTCFWIECKDESYCSHNSTVSDCQVGNTTDFCSVPTATLVPTANSTAKPTVQPSPSTTSKTVTTSGTTNTTVTPTSQPVRKSTFDAASFIGGIVLVLGVQAVIFFLYKFCKSKERNYHTL

SEQ ID NO: 75 - protein, 194 aa, Sus scrofa
MLGLSRQLLWAVGCLAALCVLTAAKNSTILPPSTTTPWLSPPTTQTTSAPPKTLPTPAPEICENRNSCISCFDANNTCFWIECKGKSYCSDNSTVSDCHVVNGTDFCSGPTVTPLPTNSTAKTTTLPSPSSASTTATTSGTTNTTLAPTTQPMRKSTFDAASFIGGIVLVLGVQAVIFFLYKFCKSKERNYHTL

SEQ ID NO: 76 - protein, 198 aa, Bos taurus
MSGLSRPLLLAVGCLAALCVITAAGNTTLAPNVTTASSPPPTTTTVPVSPTTLSPLPVTTPAPDICGSRNSCVSCVDGNATCFWIECKGKSYCSDNSTAGDCKVVNTTGFCSVPTTTPTPTNSTAKTTTLPSTTTTSTTATTSGTTNTTLSPTIQPTRKSTFDAASFIGGIVLVLGVQAVIFFLYKFCKSKERNYHTL

SEQ ID NO: 77 - protein, 198 aa, Ovis aries
MSGLSRPLLLAVGYLAALCVITAARNTTVTPNVTTPSSPPPTTATVPVSPTTLTPPPVTTPAPDICGSRNSCISCVDGNATCFWIECKGKSYCSDNSTVSDCKVVNTTGFCAVPTTTPTPTNSTAKTTTLPSTTTTSTTATTSGTANTTLTPTIQPMRKSTFDAASFIGGIVLVLGVQAVIFFLYKFCKSKERNYHTL

SEQ ID NO: 78 - protein, 198 aa, Canis lupus familiaris
MSGLSRQLCWAAACLAALCALTAAQSFSSDPNGTTTTTQATTDAATTRVTTAAPATTPAPDPCDNRNSCVSCVNTSVDATACSWIECKEKSYCSHNTTVSDCQVVNSTQLCSAPEPTMMPTNSTAKTTTQPSSSTATTTATTSGTTNITLSPTSQPGRKSTFDAASFIGGIVLILGVQAVIFFLYKFCKSKERNYHTL

SEQ ID NO: 79 - protein, 195 aa, Rattus norvegicus
MSGASRGLFWAATCLAALCLSAAQSNSSASPNVTDPPTTTSKVVPTTLTTTKPPETCESFNSCVSCVNATLTNNITCVWLDCHEANKTYCSSELVSNCTQKTSTDSCSVIPTTPVPTNSTAKPTTRPSSPTPTPSVVTSAGATNTTVTPTSQPERKSTFDAASFIGGIVLVLGVQAVIFFLYKFCKSKERNYHTL

SEQ ID NO: 80 - protein, 354 aa, Homo sapiens
MRLAVLFSGALLGLLAAQGTGNDCPHKKSATLLPSFTVTPTVTESTGTTSHRTTKSHKTTTHRTTTTGTTSHGPTTATHNPTTTSHGNVTVHPTSNSTATSQGPSTATHSPATTSHGNATVHPTSNSTATSPGFTSSAHPEPPPPSPSPSPTSKETIGDYTWTNGSQPCVHLQAQIQIRVMYTTQGGGEAWGISVLNPNKTKVQGSCEGAHPHLLLSFPYGHLSFGFMQDLQQKVVYLSYMAVEYNVSFPHAAQWTFSAQNASLRDLQAPLGQSFSCSNSSIILSPAVHLDLLSLRLQAAQLPHTGVFGQSFSCPSDRSILLPLIIGLILLGLLALVLIAFCIIRRRPSAYQAL

SEQ ID NO: 81 - protein, 354 aa, Pan troglodytes
MRLAVLFSGALLGLLAAQGTGNDCPHKKSATLLPSFTVTPTVTESTGTTSHRTTKSHKTTTHRTTTTGTASHGPTTATHNPTTTSHGNVTVHPTSNSTATSQGPSTATHSPATTSHGNATVHPTSNSTATSPGFTSSAHPEPPPPSPSPSPTSKETIGDYTWTNGSQPCVHLQAQIQIRVMYTTQGGGEAWGISVLNPNKTKVQGSCEGAHPHLLLSFPYGHLSFGFMQDLQQKAVYLSYMAVEYNVSFPHAAQWTFSAQNASLRDLQAPLGRSFSCSNSSIILSPAVHLDLLSLRLQAAQLPHTGVFGQSFSCPSDRSILLPLIIGLILLGLLALVLIAFCIIRRRPSAYQAL

SEQ ID NO: 82 - protein, 335 aa, Bos taurus
MRLAVFFSGALLGLLAAQGTGNDCPHKKSATLLPSFTVTPTATESTPSPGTTSHRTTKSHRTTTWRISTTTHTTNTTGTTSSESPTATHSPATTTSHQNTTVHPTSNITATSPGPSTRSPHPEPPPSPSPSPGSKEAIGDYTWSNGSQPCVRLQAQIQIRVLYPTQGGGEAWGISVLNPNRTKAQGGCEGTHSHLLLSFPSGQLSFGFKQDPLQSAVYLNYMAVEYNVSFPQAVQWTFSVQNSSLRDLQTPLGHSFSCRNASIIVSPALHLDLLSLKLQAAQLSPSGAFGPSFSCPNDKSILLPLIIGLILLGLLTLVLVTFCIIRRRPPTYQPL

SEQ ID NO: 83 - protein, 335 aa, Mus musculus
MRLPVCLILLGPLIAQGTEEDCPHKKAVTLLPSFTMTPTATESTASPTTSHRPTTTSHGNVTVHTSSGPTTVTHNPATTTSHGNATISHATVSPTTNGTATSPRSSTVGPHPGPPPPSPSPRSKGALGNYTWANGSQPCVQLQAQIQIRILYPIQGGRKVKLKWGLKRAWGISVLNPNKTKVQGGCDGTHPHLSLSFPYGQLTFGFKQDLHQSPSTVYLDYMAVEYNVSFPQAAQWTFMAQNSSLRELQAPLGQSFCCGNASIVLSPAVHLDLLSLRLQAAQLPDKGHFGPCFSCNRDQSLLLPLIIGLVLLGLLTLVLIAFCITRRRQSTYQPL

SEQ ID NO: 84 - protein, 354 aa, Macaca mulatta
MRLAVLFLGALLGLLAAQGTGNDCPHKKSATLLPSFTVTPTATESTGTTSHRTTKSHKTTTHRTTTTGTTSHRPTTATHNPTTTSHRNATVHPTSNSTATSQGPSTATHRPATTSHGNATVHPTSNSTATSPGLTSSAHPGPPPPSPSPSPASKETIGDYMWTNGSQPCVHLQAQIQIRVMYTTQGGGEAWGISVLNPNKTKVQGSCEGAHPHLLLSFPYGHLSFGFMQDLQQRVVYLSYMAVEYNVSFPHAAQWTFSAQNASLRDLQAPLGQSFSCSNSSIILSPAVHLDLLSLRLQAAQLPHTGVFGQSFSCPSDRSILLPLIIGLVLLGLLALVLIAFCIVRRRPSAYQAL

SEQ ID NO: 85 - protein, 330 aa, Rattus norvegicus
MRFPVCLTLLVLLVAQGTGKDCPHKKAATLLPSFTETPTTTGSTASPTTTHRPTTTSHRPTTTSHRPTTTSHRPTTTSHRPTTTSHRPTTTSHGNATVSPTTNSPGFSTVGPHPGPPPPSPSPSPSSTGALGNYTWTNGSQPCVQLQAQIQIRILYLTQGGKKAWGLSVLNPNKTKVQGGCDSAHPHLALSFPYGQLTFGFKQDRHQSHSTVYLNYMAVEYNVSFPQAAQWTFSAQNSSLQELQAPLGQSFCCGNTSIVLSPAIHLDLLSLRLQAAQLPDKGHFGPCFSCASDQSLLLPLIIGLVLLGLLTLVLIAFCVTRRRQSTYQPL

SEQ ID NO: 86 - protein, 329 aa, Canis lupus familiaris
MRPAVFFLGALVGLLAAQGTRSDCPHKKSATLLPSFTVTPTATESTGSPGTTSHSTTTAETTSHAPNTTTHQAPTTPGHRNTTIHPTTSNSTSNTTGTTGTGKPHTSTSYTQPGPGPRPPPPSPGPGPQDAIGDYTWTTGSQPCARLQARIQIGVVYPTQAGGQAWGISVLNPNSTKPWGDCDGARPHLLLSFPFGQLSFGFTQEPQQGSVYLDYLALQYNVSFPQAAQWTFSGQNASLRALQAPLGQSFSCRNASILLTPALRLDLLHLKLQAAQLPPSGAFGPSFSCPSEHFNLLPLIVGVISLGLLALALVTFCIIRRRPPTYQPL

SEQ ID NO: 87 - protein, 322 aa, Equus caballus
MRLAVLFSGALLGLLAAQETGNDCPHKKSATLLPSFTVTPTATESTASPGTTSHQTTQSHRTTTTGTTSDHPTTATHNPTTTSHGNTTVHPTTSNSTVTSPGSASSSPHPRPPPPSPSPSPGSKEAIGDYIWTNGSQPCVRLQAQIQIRVLYPTLGGGKAWGISVLNPNKTKAQGGCAHPHLLLSFPYGQLSFGFKQEPLQSTVYLNYIAVEYNVSFPQAAQWTFLVQNSSLRDLQAPLGQRFSCRNASIALSPAFHLDLLSLKLQAAQLTPTGAFGPSFSCPSDQSILLPLIIGLILLGLFALVLITFCVIRRRPPTYQAL

SEQ ID NO: 88 - protein, 305 aa, Oryctolagus cuniculus
MRLPVLFLALLGLHAASSGTTSHRTTKNPHTTSHSTATPGTTSHRPTTATPTTGHGNVTVHPTTSNTTSNTTTTTGTSPGFSTSTPHPGPPPPPPSPSPGSREAVGNYTWTNGSQPCVQLQAQIQIRVLYPTQGGGQAWGMSVLNPNRTKAQGGCEGPRPHLLLSFPYGQLSFGFKQDPGQGQSAVYLSYLAVEYNVSFPQAARWTFSAQNASLRDLQAPLGQSFSCRNASIAVSPALHLDLLSLRVQAAQLPRTGIFGPSFSCPADHPSILVPLIIGLILVGLLALVLVAFCIARRRPSAYQAL

SEQ ID NO: 89 - protein, 291 aa, Sus scrofa
MTLAVLFLGALLGLLAESTTSHRTTTPRTTTTGTTSHGPTTVTHNPATTTSHGNATVHPTSSSTATSPGSSTRPPHPGPPPPSPSPSPGSQEAIGDYTWTNGSQPCVQLQAQIQIRVLYPTQGGGEAWGISVLNPNKTKALGGCEGAHPHVRLSFPYGQLTFGFKQQPQESTVYLNYMAVEYNVSFPRAAQWTFSVQNSSLRDLQTPVGRSYSCRNASIILSTAFHLDLLSLKLQAAQLPPTGNFGPSFSCPSDQTILLPLIIGLIFLGLLILVLVTFCIIRRRPPAYQPL

SEQ ID NO: 90 - protein, 354 aa, Papio anubis
MRLAVLFSGALLGLLAAQGTGNDCPHKKSATLLPSFTVTPTATESTGTTSHRTTKSHKTTTHRTTTTGTTSHRPTTATHNPNTTSHRNATVHPTSNSTATSQGPSTATHRPATTSHGNATVHPTSNSTATSPGLTSSAHPGPPPPSPSPSPASKETIGDYMWTNGSQPCVHLQAQIQIRVMYTTQGGGEAWGISVLNPNKTKVQGSCEGAHPHLLLSFPYGHLSFGFMQDLQQRVVYLSYMAVEYNVSFPHAAQWTFSAQNASLRDLQAPLGQSFSCSNSSIILSPAVHLDLLSLRLQAAQLPHTGVFGQSFSCPSDRSILLPLIIGLVLLGLLALVLIAFCIVRRRPSAYQAL

SEQ ID NO: 91 - protein, 323 aa, Monodelphis domestica
MRLSLLLSGILLGLLAEQGAGDKCPQEKSVTLVPSFTVTTIATERSTTSPETTTSSGSTATTYRTSTAATTPHSNSTATSYSTTSEGTAVTHGTTTSPRNTSTTSTSQSVPVPPSPQPTSSPSGAVGDYIGANGSQLCVHLRAQIQMRVLYQASGGGKLWGIFVLNPNRTMAQGNCEANHSSLILSFPNGKLIFGFKQDSIKKIVYLSHLATEFNVSFPSATRWIFSVENSSLQDLQTPLGHSFSCRNRSIALSPDIHLDLLSLQLQAAQLSSSGAFGAAFSCSADLNILVPLVVGLVLLTLLILVLSAFCISRRRPPAYQPL

SEQ ID NO: 92 - protein, 263 aa, Ornithorhynchus anatinus
MGLTLPLPAQGSQCRANCPHKKSATLVPSFTVTPTATSGPTTTAHQTTTDHGTTTSHETTTSQGTSTHGTSTPHTTTTGHGTTTGHQNTSHSTTTSHGTSTPHKTTTRHPTTSHGTTTSHGTSTGHWTARPTIRPGPPPPPPSPGKAVGNYTVFNGSQPCLRLRAEIRLWVLYQAQEEGEAPPVSGAASFPPPRPRPVAGEGDGERSRVTPVASAMTVEGGSRAGFAMLGAEVRSRAPSLGRAGKTRLRIHQPVVVLQHTYYV

SEQ ID NO: 93 - protein, 280 aa, Homo sapiens
MDLQGRGVPSIDRLRVLLMLFHTMAQIMAEQEVENLSGLSTNPEKDIFVVRENGTTCLMAEFAAKFIVPYDVWASNYVDLITEQADIALTRGAEVKGRCGHSQSELQVFWVDRAYALKMLFVKESHNMSKGPEATWRLSKVQFVYDSSEKTHFKDAVSAGKHTANSHHLSALVTPAGKSYECQAQQTISLASSDPQKTVTMILSAVHIQPFDIISDFVFSEEHKCPVDEREQLEETLPLILGLILGLVIMVTLAIYHVHHKMTANQVQIPRDRSQYKHMG

SEQ ID NO: 94 - protein, 280 aa, Pan troglodytes
MDLRGRAVPSIDRLRVLLMLFHTMAQIMAEQEVENLSGLSTNPEKDIFVVRENGTTCLMAEFAAKFIVPYDVWASNYVDLITEQADIALTRGAEVKGRCGHSESELQVFWVDRAYALKMLFVKESHNMSKGPEATWRLSKVQFVYDSSEKTHFKDAVSAGKHTANSHHLSALVTPAGKSYECQAQQTISLASSDLQKTVTMILSAVHIQPFDIISDFVFSEEHKCPVDEREQLEETLPLILGLILGLVIMVTLAIYHVHHKMTANQVQIPRDRSQYKHMG

SEQ ID NO: 95 - protein, 280 aa, Macaca mulatta
MDLQGRAVPSVDRLRVLLMLFHTMAQIMAEQEVENLSGLSTNPEKDIFVVRENGTTCLMAEFAAKFIVPYDVWASNYVDLITEQADIALTRGAEVKGRCGHSESELQVFWVDRAYALKMLFVKESHNTSKGPEATWRLSKVQFVYDSSEKTHFKDAVSAGKHTANSHHLSALVTPAGKSYECQAQQTISLASSDPQKMVTMILSAVHIQPFDIISDFVFSEEHKCPVDEREQLEETLPLILGLILGLVIVVTLTIYHVHHKMTANQVQIPRDRSQYKHMG

SEQ ID NO: 96 - protein, 280 aa, Canis lupus familiaris
MDLRGRAFPSVYRLRVLLMLFYTMARITAEQEVENLSGLSTNPEKDIFVVRENGTTCLMAEFAAKFIVPYDVWASNYVDLITEQADISLTRGAEVKGHCGHNESELQVFWVDRAYALKMLFVKESRNASKGPEATWRLSKVQFVYDSSEKTHFKDAVSAGKHTANSHRLSALVTPAGKSYECQAQQSISLASSDPQKTVTMILSAVHIQPFDIISDFVFSEEHKCPVDEREQLEETLPLILGLILGLVIVVTLAIYHIHHKMTANQVQIPRDRSQYKHMG

SEQ ID NO: 97 - protein, 280 aa, Bos taurus
MDLRRRALLGVDGLRVLLMLFHTVTRIMAEQEVENLSGLSTNPEKDIFVVRENGTTCLMAEFAAKFIVPYDVWASNYVDLITEQADISLTRGAEVKGHCGHDESELQVFWVDRAYALKMLFLKESHNTPKGPEATWKLSKVQFVYDSSEKTHFKDAVSAGKHTANSHHLSALVTPAGKSYECQAQQTISLASSDPQKTVTMILSAVHIQPFDIISDFVFSEEHKCPVDEREQLEETLPLILGLILGLVIVVTLVIYHIHHKMTANQVQIPRDRSQYKHMG

SEQ ID NO: 98 - protein, 280 aa, Mus musculus
MDLRVRTLLGGDRLRILLMFFHVMVQTVAEQEVENLSGLSTNPEKDIFVVRENGTTCLMAEFAAKFIVPYDVWASNYVDLITEQAEISLTRGAEVKGHCGHNESELEVFWVDHAYTLRMLFVKESHNTSKGPEATWNLNKVHFVYDSSEKTHFKAPVKVNKYIASSHHLSALVTPAGMSYECQAQQTISLASSDPQKTVTMILSAVHIQPFDIISDFVFSEEHKCPVDEQEQLEETLPLILGLILGLVIVITLVIYHIHHKMTANQVQIPRDRSQYKHMG

SEQ ID NO: 99 - protein, 280 aa, Rattus norvegicus
MDLRGRALLGGDRLRILLMFFHAMAQTVAEQEVENLSGLSTNPEKDIFVVRENGTTCLMAEFAAKFIVPYDVWASNYVDLITEQAEISLTRGAEVKGRCGHNESELQVFWVDRAYTLKMLFVKESHNTSKGLEATWKLSKVQFVYDSSEKTHFKDAVSAGKHTANSHHLSALVTPAGMSYECQAQQTISLASSDPQKTVTMILSAVHIQPFDIISDFVFSEEHKCPVDEREQLEETLPLILGLILGLVIVITLVIYHIHHKMTANQVQIPRDRSQYKHMG

SEQ ID NO: 100 - protein, 299 aa, Gallus gallus
MAAGRLPGLLFLLHAAARLAAEQEVENLSGLSPNPEKDIFVVRENRTTCLMAEFAAKFVVPYDVWASNYVDLITEQADIPLSRGAEMKGKCGTNESELEISWLERAYTLKLFFLKVRGCPRRLGRGRCAAALRGPDQPCPPQEGHNTSRGPEAFWRLSRIQFSYDTSERTYFKDAVSPGKHTASSHRLSALVTPAGKSYECQAQQTISLISSDHQKSVQLLLSEVRIQPFDITADFVFSEEHKCPVDQREQLEETLPLILGLILGLVIVITLCVYHIHHKLTANQVQIPRDRSQYKHMG

SEQ ID NO: 101 - protein, 276 aa, Xenopus tropicalis
MDYRACTSALRMPVLLLLLCTFSCNLAEQEVENLSGLSSNPDKNIFAIRENGTTCLMAEFSARILVPYEVPSSNEVDWDLEEASIQLPRDTEIRGKCWNNESELHLSWLDKAYTLKLFFSKEGQDASKSRSWKMSKIQFLYDPSEHTIFKSGARPGRHTANSHHLSLMVTPAGMSYECEATQRISLTSTDHQKIVVLYLSEVHLQPFDIKSDFVYSEEYKCPTDQRKQLEETLPLILGLTLGVAILIIVAVYHIHHKMTANQVQIPRDRSLYKHMG

SEQ ID NO: 102 - protein, 338 aa, Rattus norvegicus
MVGRVQPDRKQLPLVLLRLLCLLPTGLPVRSVDFNRGTDNITVRQGDTAILRCVVEDKNSKVAWLNRSGIIFAGHDKWSLDPRVELEKRHALEYSLRIQKVDVYDEGSYTCSVQTQHEPKTSQVYLIVQVPPKISNISSDVTVNEGSNVTLVCMANGRPEPVITWRHLTPLGREFEGEEEYLEILGITREQSGKYECKAANEVSSADVKQVKVTVNYPPTITESKSNEATTGRQASLKCEASAVPAPDFEWYRDDTRINSANGLEIKSTEGQSSLTVTNVTEEHYGNYTCVAANKLGVTNASLVLFRPGSVRGINGSISLAVPLWLLAASLFCLLSKC

SEQ ID NO: 103 - protein, 338 aa, Equus caballus
MVGRVQPDRKQLPLVLLRLLCLLPTGLPVRSVDFNRGTDNITVRQGDTAILRCVVEDKNSKVAWLNRSGIIFAGHDKWSLDPRVELEKRHSLEYSLRIQKVDVYDEGSYTCSVQTQHEPKTSQVYLIVQVPPKISNISSDVTVNEGSNVTLVCMANGRPEPVITWRHLTPTGREFEGEEEYLEILGITREQSGKYECKAANEVSSADVKQVKVTVNYPPTITESKSNEATTGRQASLKCEASAVPAPDFEWYRDDTRITSANGLEIKSTEGQSSLTVANVTEEHYGNYTCVAANNLGVTNASLVLFRPGSVRGINGSISLAVPLWLLAASLLCLLSKC

SEQ ID NO: 104 - protein, 338 aa, Sus scrofa
MVARVQPDRKQLPLVLLRLLCLLPTGLPVRSVDFNRGTDNITVRQGDTAILRCVVEDKNSKVAWLNRSGIIFAGHDKWSLDPRVELEKRHSLEYSLRIQKVDVYDEGSYTCSVQTQHEPKTSQVYLIVQVPPKISNISSDVTVNEGSNVTLVCMANGRPEPVITWRHLTPTGRELEGEEEYLEILGITREQSGKYECKAANEVSSADVKQVKVTVNYPPTITESKSNEATTGRKASLKCEASAVPAPDFEWYRDDTRINSANGLEIKSTEGQSSLTVTNVTEEHYGNYTCVAANNLGVTNASLVLFRPGSVRGINGSISLAVPLWLLAASLLCLLSKC

SEQ ID NO: 105 - protein, 338 aa, Bos taurus
MVARVQPDRKQLPLVLLRLLCLLPTGLPVRSVDFNRGTDNITVRQGDTAILRCVVEDKNSKVAWLNRSGIIFAGHDKWSLDPRVELEKRHSLEYSLRIQKVDVYDEGSYTCSVQTQHEPKTSQVYLIVQVPPKISNISSDVTVNEGSNVTLVCMANGRPEPVITWRHLTPTGREFEGEEEYLEILGITREQSGKYECKAANEVSSADVKQVKVTVNYPPTITESKSNEATTGRKASLKCEASAVPAPDFEWYRDDTRINSANGLEIKSTEGQSSLTVTNVTEEHYGNYTCVAANNLGMTNASLVLFRPGSVRGINGSISLAVPLWLLAASLLCLLSKC

SEQ ID NO: 106 - protein, 417 aa, Anopheles gambiae str. PEST
MSFAGEAASQILNKAEPLFISRSEAFKFAVGDTITLPCEVASPGTYVLAWKRGIAILTAGSVKVTPDPRVRLVNGYSLQIRDAVPQDAGDYICQIAMLDPREITHSVEILVPPKITHVTSGGHLQVRKGSPVRLECSATGNPMPNITWTRKNNLLPNGEEQFTNPVYVIENMDRHKGGTYICTANNGVGQVATSQIILHVLYPPEISVENPTVYSGEGQEAMLVCIVHGESQPEVLWHKDTMQIDQTERHVIENRGARHTLIIRKVHPQDFGNYSCIADNQLGKTRKTVTLTGKPKTAVFRSVPNSQWKDKYNISWIVDSHSPIEEFKLYYRQMTFSIGQLQPLQTDWRDIVLPAFPYSHHYTQGMSYLIRGLEPDQQYEARVQSRNRYGWSDFSESFLFTTSNTGKWMGQCCTNPG

SEQ ID NO: 107 - protein, 334 aa, Xenopus tropicalis
MRPCLLHSIWMLGFVLCLLSLQGLPVRSGDFNRSTDNITVRQGDTAILRCFVEDRSSRVAWLNRSGIIFAGDDKWSLDPRVELEKRSLLEYSLRIQKVDVSDEGPYTCSVQTKQHTKTTQVYLIVQVPPKISNISADITVNEGSNVTLMCIAYGRPEPMITWRHLTPTARDFEGEEEFLEIQGITREQSGRYECKAANEVASADVKQVRVTVNYPPIITESKSNEATTGKQAILRCEASAVPAPDFEWYKDDTRINSAQGLEIRNTGSRSVLMVANVTEEHYGNYTCVAANKLGITNTSLYLYIGPGTPIDSATSLAASLWLMANLLFCLFCTC

SEQ ID NO: 108 - protein, 338 aa, Canis lupus familiaris
MLGARRPPRSQLPLVLLRLLCLLPTGLPVRSVDFNRGTDNITVRQGDTAILRCVVEDKNSKVAWLNRSGIIFAGHDKWSLDPRVELEKRHSLEYSLRIQKVDVYDEGSYTCSVQTQHEPKTSQVYLIVQVPPKISNISSDVTVNEGSNVTLVCMANGRPEPVITWRHLTPTGREFEGEEEYLEILGITREQSGKYECKAANEVSSADVRQVKVTVNYPPTITESKSNEATTGRKASLKCEASAVPAPDFEWYRDDTRINSANGLEIKSTEGQSSLTVTNVTEEHYGNYTCVAANNLGVTNASLVLFRPGSVRGINGSISLAVPLWLLAASLLCLLSKC

SEQ ID NO: 109 - protein, 338 aa, Monodelphis domestica
MVGRVHPDRKQLPLVLLRLLCLLPTGLPVRGVDFTRGTDNITVRQGDTAILRCYVEDKSSKVAWLNRSGIIFAGHDKWSLDPRVELEKRTALEYSLRIQKVDVYDEGSYTCSVQTQHQPKTSQVYLIVQVPPKISNISSDVTVNEGSNVTLVCMANGRPEPVITWRHLTPTGREFEGEEEYLEILGITREQSGKYECKAANEVSSADVKQVKVTVNYPPTITESKSNEATTGRQASLKCEASAVPAPDFEWYRDDTRINSANGLEIKSIEGQSLLMVTNVTEEHYGNYTCVAANKLGVTNASLILFRPGSVRGINGSISLAVPLWLLAASLFCLLSKC

SEQ ID NO: 110 - protein, 338 aa, Gallus gallus
MVARAQPDRKQLPLVLLRLLCLLPTGLPVRSVDFTRGTDNITVRQGDTAILRCFVEDRSSKVAWLNRSGIIFAGEDKWSLDPRVELEKRSPLEYSLRIQKVDVYDEGSYTCSVQTQHHPKTSQVYLIVQVPPKISNISSDITVNEGSNVTLVCMANGRPEPVITWRHLTPTGKEFEGEEEYLEILGITREQSGKYECKAANEVASADVKQVRVTVNYPPTITESKSNEAATGRQALLRCEASAVPTPDFEWYRDDTRINSANGLEIKSTGSQSLLMVANVTEEHYGNYTCVAANKLGVTNASLYLYRPGTGRVDNGSVSLAVPLWLLAASLLCLLSKC

SEQ ID NO: 111 - protein, 335 aa, Taeniopygia guttata
MRTYWLHSIWVLGFFLSLFSLQGLPVRSVDFTRGTDNITVRQGDTAILRCYVEDRSSKVAWLNRSGIIFAGEDKWSLDPRVELEKRNPLEYSLRIQKVDVYDEGSYTCSVQTQHHPKTSQVYLIVQVPPKISNISSDITVNEGSNVTLVCMANGRPEPVITWRHLTPTGKEFEGEEEYLEILGITREQSGKYECKAANEVASADVKQVRVTVNYPPTITESKSNEAATGRQALLRCEASAVPTPDFEWYRDDTRINSANGLEIKSTGSQSLLMVANVTEEHYGNYTCVAANKLGVTNASLYLYRPGTGRVDNGSMSLAVPLWLLAASLLCLLSKC

SEQ ID NO: 112 - protein, 334 aa, Xenopus tropicalis; identical to SEQ ID NO: 107

SEQ ID NO: 113 - protein, 337 aa, Oreochromis niloticus
MQVGRKSCWRQLQASFFRLLCLIPTGFPVRSVDMQRATDNITIRQGDTAIIRCYVDDKVSKVAWLNRSNIIFAGQDKWSLDPRVDLVTKGQLEYSLRIQKVDVYDEGSYTCSIQTKQQPKTSQVYLIVQVPASIYQVSNDITVNEGSNVTLSCLANGRPDPAITWRLLNPSAEPLDGEEYLDIIGIMRTQAGRYECKASNDVATPDVKYVNVIVNYPPTIKKTQSSETPVGRNGTLRCEVTAVPTPEFEWYRDDKRLANTQSITIQTSGTTTSLTIANITEEDYGNYTCVASNRLGVQNASLFLYRPGTGRDINGSACVSQSLWLLLASFACLFLKC

SEQ ID NO: 114 - DNA, 492 bp, ARTIFICIAL SEQUENCE
  Synthetic
ctcgagatgggcgtgttctgctacgaggacgaggccacaagcgtgatccctcccgccagactgttcaagagcttcgtgctggacgccgacaatctgatccccaaagtggccccccagcacttcaccagcgccgagaatctggaaggcaatggcggacccggcaccatcaagaagatcacattcgccgagggcaacgagttcaagtacatgaagcacaaagtggaagagatcgaccacgccaacttcaagtactgctacagcatcatcgaaggcggccctctgggccacacactggaaaagatcagctacgagatcaagatggccgctgcccctcacggcggaggcagcattctgaagatcaccagcaagtaccacaccaagggcaacgccagcatcaacgaggaagaaatcaaggccggcaaagagaaagccgccggactgtttaaggccgtggaagcctatctgctggcccaccccgatgcctacgaattc

SEQ ID NO: 115 - protein, 160 aa, ARTIFICIAL SEQUENCE
  Synthetic
MGVFCYEDEATSVIPPARLFKSFVLDADNLIPKVAPQHFTSAENLEGNGGPGTIKKITFAEGNEFKYMKHKVEEIDHANFKYCYSIIEGGPLGHTLEKISYEIKMAAAPHGGGSILKITSKYHTKGNASINEEEIKAGKEKAAGLFKAVEAYLLAHPDAY

SEQ ID NO: 116 - DNA, 906 bp, ARTIFICIAL SEQUENCE
  Synthetic
ctcgagatcaacgtgggactgcggagacagcagcagcggtacttcggcgagtgcaatctggaccggctgaacgctctggaacccaccaacagaatcgaggccgaggcttgccagatcgagagctgggaccacaacgaccagcagttccagtgtgctggcgtggccgtgatcagacggaccatcgagcccaacggactgctgctgccccagtacagcaatgcccccgagctgatctacatcgagcggggcagaggaatcaccggcgtgctgtttcccggctgccccgagacattcgaggaccctcagcagcagagccagcaaggccagagacaaggccaaggccagtcccagagaagcgagcaagaccggcaccagaagatccggcacttcagagagggcgacatcattgctctgccagccggcgtggcccactggtgctacaatgatggcgatagccccgtcgtgaccgtgtctctgctgcacaccaacaactacgccaaccagctggacgagaaccccagacacttctatctggccggcaaccccgacgacgagcaccagaggcaagggcagcagcagttcggccagagaagaaggcagcagcagcacagccatggcgagcaaggcgagcaagagcagcaaggcgagggcaacaacgtgttcagcggcttcgacgccgagtttctggccgacgccttcaacgtggacgtggacacagccagacggctgcagtccaaccaagacaagcggcggaacatcgtgaaagtggaaggccggctccaagtcgtgcggcccgagagatctagacaagagtgggagcggcaagagcggcaagaacgcgagagcgagcaagagagagagcggcagagaaggcaaggcggcagaggcagagatgtgaacgaattc

SEQ ID NO: 117 - protein, 298 aa, ARTIFICIAL SEQUENCE
  Synthetic
INVGLRRQQQRYFGECNLDRLNALEPTNRIEAEACQIESWDHNDQQFQCAGVAVIRRTIEPNGLLLPQYSNAPELIYIERGRGITGVLFPGCPETFEDPQQQSQQGQRQGQGQSQRSEQDRHQKIRHFREGDIIALPAGVAHWCYNDGDSPVVTVSLLHTNNYANQLDENPRHFYLAGNPDDEHQRQGQQQFGQRRRQQQHSHGEQGEQEQQGEGNNVFSGFDAEFLADAFNVDVDTARRLQSNQDKRRNIVKVEGRLQVVRPERSRQEWERQERQERESEQERERQRRQGGRGRDVN

SEQ ID NO: 118 - DNA, 1410 bp, ARTIFICIAL SEQUENCE
  Synthetic
catatgctcgagatgggcgtgttctgctacgaggacgaggccacaagcgtgatccctcccgccagactgttcaagagcttcgtgctggacgccgacaatctgatccccaaagtggccccccagcacttcaccagcgccgagaatctggaaggcaatggcggacccggcaccatcaagaagatcacattcgccgagggcaacgagttcaagtacatgaagcacaaagtggaagagatcgaccacgccaacttcaagtactgctacagcatcatcgaaggcggccctctgggccacacactggaaaagatcagctacgagatcaagatggccgctgcccctcacggcggaggcagcattctgaagatcaccagcaagtaccacaccaagggcaacgccagcatcaacgaggaagaaatcaaggccggcaaagagaaagccgccggactgtttaaggccgtggaagcctatctgctggcccaccccgatgcctacggcggagggggcatcaacgtgggactgcggagacagcagcagcggtacttcggcgagtgcaatctggaccggctgaacgctctggaacccaccaacagaatcgaggccgaggcttgccagatcgagagctgggaccacaacgaccagcagttccagtgtgctggcgtggccgtgatcagacggaccatcgagcccaacggactgctgctgccccagtacagcaatgcccccgagctgatctacatcgagcggggcagaggaatcaccggcgtgctgtttcccggctgccccgagacattcgaggaccctcagcagcagagccagcaaggccagagacaaggccaaggccagtcccagagaagcgagcaagaccggcaccagaagatccggcacttcagagagggcgacatcattgctctgccagccggcgtggcccactggtgctacaatgatggcgatagccccgtcgtgaccgtgtctctgctgcacaccaacaactacgccaaccagctggacgagaaccccagacacttctatctggccggcaaccccgacgacgagcaccagaggcaagggcagcagcagttcggccagagaagaaggcagcagcagcacagccatggcgagcaaggcgagcaagagcagcaaggcgagggcaacaacgtgttcagcggcttcgacgccgagtttctggccgacgccttcaacgtggacgtggacacagccagacggctgcagtccaaccaagacaagcggcggaacatcgtgaaagtggaaggccggctccaagtcgtgcggcccgagagatctagacaagagtgggagcggcaagagcggcaagaacgcgagagcgagcaagagagagagcggcagagaaggcaaggcggcagaggcagagatgtgaacgaattcgtcgac

SEQ ID NO: 119 - protein, 462 aa, ARTIFICIAL SEQUENCE
  Synthetic
MGVFCYEDEATSVIPPARLFKSFVLDADNLIPKVAPQHFTSAENLEGNGGPGTIKKITFAEGNEFKYMKHKVEEIDHANFKYCYSIIEGGPLGHTLEKISYEIKMAAAPHGGGSILKITSKYHTKGNASINEEEIKAGKEKAAGLFKAVEAYLLAHPDAYGGGGINVGLRRQQQRYFGECNLDRLNALEPTNRIEAEACQIESWDHNDQQFQCAGVAVIRRTIEPNGLLLPQYSNAPELIYIERGRGITGVLFPGCPETFEDPQQQSQQGQRQGQGQSQRSEQDRHQKIRHFREGDIIALPAGVAHWCYNDGDSPVVTVSLLHTNNYANQLDENPRHFYLAGNPDDEHQRQGQQQFGQRRRQQQHSHGEQGEQEQQGEGNNVFSGFDAEFLADAFNVDVDTARRLQSNQDKRRNIVKVEGRLQVVRPERSRQEWERQERQERESEQERERQRRQGGRGRDVN

SEQ ID NO: 120 - DNA, 1053 bp, ARTIFICIAL SEQUENCE
  Synthetic
ctcgaggccagacagagccagctgagcccccagaatcagtgccagctgaaccagctgcaagccagagagcccgacaaccggattcaagccgaggccggccagatcgagacatggaacttcaaccaagaggacttccagtgtgccggcgtggccgccagcagaatcaccatccagcggaacggactgcatctgcccagctacagcaacgccccccagctgatctacatcgtgcaaggcagaggcgtgctgggcgccgtgtttagcggatgccccgagacattcgaggaaagccagcagagcagccagcaaggccggcagcaagagcaagaacaagagagacaacagcagcagcaaggggagcaaggcagacagcaaggacagcaagagcagcagcaagagcgccaaggacggcagcaagggcgccagcagcaagaagagggcagacagcaagaacagcagcaaggccagcaagggcggcctcagcagcagcagcagttccggcagttcgaccggcaccagaaaacccggcggatcagagaaggcgacgtggtggctattccagccggggtggcctactggtcctacaacgacggcgaccaagaactggtggccgtgaatctgttccacgtgtccagcgaccacaaccagctggaccagaacccccggaagttctatctggctggcaaccccgagaacgagttcaaccagcaagggcagagccagcccagacagcaaggcgaacaaggacggcccggacagcaccagcagcctttcggcagaccacggcagcaagagcagcaaggcagcggcaacaacgtgttcagcggcttcaacacccagctgctggcccaagctctgaacgtgaacgaggaaaccgcccggaatctgcaaggccagaacgacaacagaaaccagatcatcagagtgcggggcaatctggacttcgtgcagccccctagagggcggcaagagagagagcacgaagagaggcagcaagaacagctgcagcaagagcggcagcagcaaggcggacagctgatggccaacgaattc

SEQ ID NO: 121 - protein, 347 aa, ARTIFICIAL SEQUENCE
  Synthetic
ARQSQLSPQNQCQLNQLQAREPDNRIQAEAGQIETWNFNQEDFQCAGVAASRITIQRNGLHLPSYSNAPQLIYIVQGRGVLGAVFSGCPETFEESQQSSQQGRQQEQEQERQQQQQGEQGRQQGQQEQQQERQGRQQGRQQQEEGRQQEQQQGQQGRPQQQQQFRQFDRHQKTRRIREGDVVAIPAGVAYWSYNDGDQELVAVNLFHVSSDHNQLDQNPRKFYLAGNPENEFNQQGQSQPRQQGEQGRPGQHQQPFGRPRQQEQQGSGNNVFSGFNTQLLAQALNVNEETARNLQGQNDNRNQIIRVRGNLDFVQPPRGRQEREHEERQQEQLQQERQQQGGQLMAN

SEQ ID NO: 122 - DNA, 1548 bp, ARTIFICIAL SEQUENCE
  Synthetic
ctcgagaagatcgaccccgagctgaagcagtgcaagcaccagtgcaaagtgcagcggcagtacgacgagcagcagaaagaacagtgcgtgaaagagtgcgagaagtactacaaagagaagaagggccgcgagcgcgagcacgaagaggaagaggaagaatggggcaccggcggagtggacgagccttctacacacgagcccgccgagaaacatctgagccagtgcatgagacagtgcgaacggcaagagggcggccagcagaaacagctgtgccggttccggtgccaagagcggtacaagaaagagcggggccagcacaactacaagagagaggacgacgaggacgaagatgaggacgaggctgaggaagaggacgagaacccctacgtgttcgaggatgaggacttcaccaccaaagtgaaaaccgagcaaggcaaagtggtgctgctgcccaagttcacccagaagtccaagctgctgcacgctctggaaaagtaccggctggccgttctggtggccaaccctcaagccttcgtggtgcccagccacatggacgccgacagcatcttcttcgtgtcttggggcagaggcaccatcaccaagattctggaaaacaagcgcgagagcatcaacgtgcggcaaggcgacatcgtgtccatcagcagcggcacccccttctacattgccaacaacgacgagaacgagaagctgtatctggtgcagtttctgcggcccgtgaatctgcccggccactttgaagtgttccacggacccggcggagagaaccccgagagcttctacagagccttcagctgggaaattctggaagccgctctgaaaacatccaaggacacactggaaaagctgttcgagaagcaagaccaagggaccatcatgaaggccagcaaagaacagatccgggccatgagcagaagaggcgagggccccaagatctggcccttcaccgaggaaagcaccggcagcttcaagctgtttaagaaggaccccagccagagcaacaaatacgggcagctgtttgaggccgagcggatcgactaccccccactggaaaagctggacatggtggtgtcctacgccaatatcaccaagggcggcatgagcgtgcccttttacaacagcagagccaccaagatcgccatcgtggtgtccggcgagggctgcgtggaaatcgcttgccctcatctgagcagcagcaagtccagccaccccagctacaagaagctgcgggccagaatccggaaggacaccgtgttcatcgtgccagccggccacccttttgccacagtggccagcggcaacgagaatctggaaatcgtgtgcttcgaagtgaacgccgagggcaacatccggtacacactggccggcaagaagaacatcatcaaagtgatggaaaaggaagccaaagaactggcctttaagatggaaggcgaggaagtggacaaagtgttcggcaagcaagatgaagagttcttctttcaaggccccgagtggcgcaaagagaaagagggcagagccgacgaggaattc

SEQ ID NO: 123 - protein, 512 aa, ARTIFICIAL SEQUENCE
  Synthetic
KIDPELKQCKHQCKVQRQYDEQQKEQCVKECEKYYKEKKGREREHEEEEEEWGTGGVDEPSTHEPAEKHLSQCMRQCERQEGGQQKQLCRFRCQERYKKERGQHNYKREDDEDEDEDEAEEEDENPYVFEDEDFTTKVKTEQGKVVLLPKFTQKSKLLHALEKYRLAVLVANPQAFVVPSHMDADSIFFVSWGRGTITKILENKRESINVRQGDIVSISSGTPFYIANNDENEKLYLVQFLRPVNLPGHFEVFHGPGGENPESFYRAFSWEILEAALKTSKDTLEKLFEKQDQGTIMKASKEQIRAMSRRGEGPKIWPFTEESTGSFKLFKKDPSQSNKYGQLFEAERIDYPPLEKLDMVVSYANITKGGMSVPFYNSRATKIAIVVSGEGCVEIACPHLSSSKSSHPSYKKLRARIRKDTVFIVPAGHPFATVASGNENLEIVCFEVNAEGNIRYTLAGKKNIIKVMEKEAKELAFKMEGEEVDKVFGKQDEEFFFQGPEWRKEKEGRADE

SEQ ID NO: 124 - DNA, 1383 bp, ARTIFICIAL SEQUENCE
  Synthetic
ctcgagctgagcgtgtgctttctgattctgttccacggctgtctggccagccggcaagaatggcagcagcaagacgagtgccagatcgaccggctggacgctctggaacccgacaaccgggtggaatacgaggccggcacagtggaagcttgggaccccaaccacgagcagttcagatgtgccggcgtggcactcgtgcggcacaccatccagccaaacggactgctgctgccccagtacagcaacgccccccagctgatctatgtggtgcaaggcgagggcatgaccggcatcagctatcccggctgccccgagacatatcaagcccctcagcaaggcagacagcaaggccagagcggccggttccaagaccggcaccagaagatccggcggttcagacggggcgacatcattgccattccagccggggtggcccactggtgctacaacgagggcaatagccccgtcgtgaccgtgacactgctggacgtgtccaacagccagaaccagctggaccggaccccccggaagtttcatctggccggcaaccccaaggacgtgttccagcaacagcagcagcaccagagccggggcagaaatctgttcagcggcttcgacaccgagctgctggccgaggcttttcaagtggacgagcggctgatcaagcagctgaagtccgaggacaacagaggcggcatcgtgaaagtgaaggacgacgagctgagagtgatccggcccagcagaagccagagcgagagaggcagcgagagcgaggaagagtctgaggacgagaagcggagatggggccagcgggacaacggcatcgaagagacaatctgcaccatgcggctgaaagagaacatcaacgaccccgccagagccgacatctacacccccgaagtgggccggctgacaactctgaactctctgaatctgcccattctgaagtggctgcagctgtccgtggaaaagggggtgctgtacaagaacgctctggtgctgcctcactggaatctgaacagccacagcatcatctacggctgcaagggcaagggccaagtccaagtggtggacaacttcggcaacagagtgttcgacggcgaagtgcgcgagggccagatgctcgtggtgccccagaatttcgccgtcgtgaagcgggccagagaagaaagattcgagtggatcagcttcaagaccaacgaccgggccatgaccagccctctggccggaagaacatctgtgctgggcggcatgcccgaggaagtgctggctaacgccttccagatcagcagagaggacgcccggaagatcaagttcaacaaccagcagaccacactgaccagcggcgagagcagccaccacatgagagatgacgccgaattc

SEQ ID NO: 125 - protein, 457 aa, ARTIFICIAL SEQUENCE
  Synthetic
LSVCFLILFHGCLASRQEWQQQDECQIDRLDALEPDNRVEYEAGTVEAWDPNHEQFRCAGVALVRHTIQPNGLLLPQYSNAPQLIYVVQGEGMTGISYPGCPETYQAPQQGRQQGQSGRFQDRHQKIRRFRRGDIIAIPAGVAHWCYNEGNSPVVTVTLLDVSNSQNQLDRTPRKFHLAGNPKDVFQQQQQHQSRGRNLFSGFDTELLAEAFQVDERLIKQLKSEDNRGGIVKVKDDELRVIRPSRSQSERGSESEEESEDEKRRWGQRDNGIEETICTMRLKENINDPARADIYTPEVGRLTTLNSLNLPILKWLQLSVEKGVLYKNALVLPHWNLNSHSIIYGCKGKGQVQVVDNFGNRVFDGEVREGQMLVVPQNFAVVKRAREERFEWISFKTNDRAMTSPLAGRTSVLGGMPEEVLANAFQISREDARKIKFNNQQTTLTSGESSHHMRDDA

SEQ ID NO: 126 - DNA, 366 bp, ARTIFICIAL SEQUENCE
  Synthetic
ctcgagagcatctaccgggccatcgtggaagtggaagaggacagcggcagagagcagagctgccagcggcagttcgaggaacagcagcggttcagaaactgccagagatacgtgaagcaagaagtgcagagaggcggcagatacaaccagagacaagagtctctgagagagtgctgccaagagctgcaagaagtggaccggcgctgccggtgccagaatctggaacagatggtgcgccagctgcagcagcaagagcagatcaagggcgaggaagtgcgcgagctgtacgagacagccagcgagctgcctcggatctgcagcatcagcccaagccaaggctgccagttccagagcagctacgaattc

SEQ ID NO: 127 - protein, 118 aa, ARTIFICIAL SEQUENCE
  Synthetic
SIYRAIVEVEEDSGREQSCQRQFEEQQRFRNCQRYVKQEVQRGGRYNQRQESLRECCQELQEVDRRCRCQNLEQMVRQLQQQEQIKGEEVRELYETASELPRICSISPSQGCQFQSSY

SEQ ID NO: 128 - DNA, 3297 bp, ARTIFICIAL SEQUENCE
  Synthetic
ctcgagctgagcgtgtgctttctgattctgttccacggctgtctggccagccggcaagaatggcagcagcaagacgagtgccagatcgaccggctggacgctctggaacccgacaaccgggtggaatacgaggccggcacagtggaagcttgggaccccaaccacgagcagttcagatgtgccggcgtggcactcgtgcggcacaccatccagccaaacggactgctgctgccccagtacagcaacgccccccagctgatctatgtggtgcaaggcgagggcatgaccggcatcagctatcccggctgccccgagacatatcaagcccctcagcaaggcagacagcaaggccagagcggccggttccaagaccggcaccagaagatccggcggttcagacggggcgacatcattgccattccagccggggtggcccactggtgctacaacgagggcaatagccccgtcgtgaccgtgacactgctggacgtgtccaacagccagaaccagctggaccggaccccccggaagtttcatctggccggcaaccccaaggacgtgttccagcaacagcagcagcaccagagccggggcagaaatctgttcagcggcttcgacaccgagctgctggccgaggcttttcaagtggacgagcggctgatcaagcagctgaagtccgaggacaacagaggcggcatcgtgaaagtgaaggacgacgagctgagagtgatccggcccagcagaagccagagcgagagaggcagcgagagcgaggaagagtctgaggacgagaagcggagatggggccagcgggacaacggcatcgaagagacaatctgcaccatgcggctgaaagagaacatcaacgaccccgccagagccgacatctacacccccgaagtgggccggctgacaactctgaactctctgaatctgcccattctgaagtggctgcagctgtccgtggaaaagggggtgctgtacaagaacgctctggtgctgcctcactggaatctgaacagccacagcatcatctacggctgcaagggcaagggccaagtccaagtggtggacaacttcggcaacagagtgttcgacggcgaagtgcgcgagggccagatgctcgtggtgccccagaatttcgccgtcgtgaagcgggccagagaagaaagattcgagtggatcagcttcaagaccaacgaccgggccatgaccagccctctggccggaagaacatctgtgctgggcggcatgcccgaggaagtgctggctaacgccttccagatcagcagagaggacgcccggaagatcaagttcaacaaccagcagaccacactgaccagcggcgagagcagccaccacatgagagatgacgccggcggagggggcaagatcgaccccgagctgaagcagtgcaagcaccagtgcaaagtgcagcggcagtacgacgagcagcagaaagaacagtgcgtgaaagagtgcgagaagtactacaaagagaagaagggccgcgagcgcgagcacgaagaggaagaggaagaatggggcaccggcggagtggacgagccttctacacacgagcccgccgagaaacatctgagccagtgcatgagacagtgcgaacggcaagagggcggccagcagaaacagctgtgccggttccggtgccaagagcggtacaagaaagagcggggccagcacaactacaagagagaggacgacgaggacgaagatgaggacgaggctgaggaagaggacgagaacccctacgtgttcgaggatgaggacttcaccaccaaagtgaaaaccgagcaaggcaaagtggtgctgctgcccaagttcacccagaagtccaagctgctgcacgctctggaaaagtaccggctggccgttctggtggccaaccctcaagccttcgtggtgcccagccacatggacgccgacagcatcttcttcgtgtcttggggcagaggcaccatcaccaagattctggaaaacaagcgcgagagcatcaacgtgcggcaaggcgacatcgtgtccatcagcagcggcacccccttctacattgccaacaacgacgagaacgagaagctgtatctggtgcagtttctgcggcccgtgaatctgcccggccactttgaagtgttccacggacccggcggagagaaccccgagagcttctacagagccttcagctgggaaattctggaagccgctctgaaaacatccaaggacacactggaaaagctgttcgagaagcaagaccaagggaccatcatgaaggccagcaaagaacagatccgggccatgagcagaagaggcgagggccccaagatctggcccttcaccgaggaaagcaccggcagcttcaagctgtttaagaaggaccccagccagagcaacaaatacgggcagctgtttgaggccgagcggatcgactaccccccactggaaaagctggacatggtggtgtcctacgccaatatcaccaagggcggcatgagcgtgcccttttacaacagcagagccaccaagatcgccatcgtggtgtccggcgagggctgcgtggaaatcgcttgccctcatctgagcagcagcaagtccagccaccccagctacaagaagctgcgggccagaatccggaaggacaccgtgttcatcgtgccagccggccacccttttgccacagtggccagcggcaacgagaatctggaaatcgtgtgcttcgaagtgaacgccgagggcaacatccggtacacactggccggcaagaagaacatcatcaaagtgatggaaaaggaagccaaagaactggcctttaagatggaaggcgaggaagtggacaaagtgttcggcaagcaagatgaagagttcttctttcaaggccccgagtggcgcaaagagaaagagggcagagccgacgagggcggagggggcagcatctaccgggccatcgtggaagtggaagaggacagcggcagagagcagagctgccagcggcagttcgaggaacagcagcggttcagaaactgccagagatacgtgaagcaagaagtgcagagaggcggcagatacaaccagagacaagagtctctgagagagtgctgccaagagctgcaagaagtggaccggcgctgccggtgccagaatctggaacagatggtgcgccagctgcagcagcaagagcagatcaagggcgaggaagtgcgcgagctgtacgagacagccagcgagctgcctcggatctgcagcatcagcccaagccaaggctgccagttccagagcagctacgaattc

SEQ ID NO: 129 - protein, 1095 aa, ARTIFICIAL SEQUENCE
  Synthetic
LSVCFLILFHGCLASRQEWQQQDECQIDRLDALEPDNRVEYEAGTVEAWDPNHEQFRCAGVALVRHTIQPNGLLLPQYSNAPQLIYVVQGEGMTGISYPGCPETYQAPQQGRQQGQSGRFQDRHQKIRRFRRGDIIAIPAGVAHWCYNEGNSPVVTVTLLDVSNSQNQLDRTPRKFHLAGNPKDVFQQQQQHQSRGRNLFSGFDTELLAEAFQVDERLIKQLKSEDNRGGIVKVKDDELRVIRPSRSQSERGSESEEESEDEKRRWGQRDNGIEETICTMRLKENINDPARADIYTPEVGRLTTLNSLNLPILKWLQLSVEKGVLYKNALVLPHWNLNSHSIIYGCKGKGQVQVVDNFGNRVFDGEVREGQMLVVPQNFAVVKRAREERFEWISFKTNDRAMTSPLAGRTSVLGGMPEEVLANAFQISREDARKIKFNNQQTTLTSGESSHHMRDDAGGGGKIDPELKQCKHQCKVQRQYDEQQKEQCVKECEKYYKEKKGREREHEEEEEEWGTGGVDEPSTHEPAEKHLSQCMRQCERQEGGQQKQLCRFRCQERYKKERGQHNYKREDDEDEDEDEAEEEDENPYVFEDEDFTTKVKTEQGKVVLLPKFTQKSKLLHALEKYRLAVLVANPQAFVVPSHMDADSIFFVSWGRGTITKILENKRESINVRQGDIVSISSGTPFYIANNDENEKLYLVQFLRPVNLPGHFEVFHGPGGENPESFYRAFSWEILEAALKTSKDTLEKLFEKQDQGTIMKASKEQIRAMSRRGEGPKIWPFTEESTGSFKLFKKDPSQSNKYGQLFEAERIDYPPLEKLDMVVSYANITKGGMSVPFYNSRATKIAIVVSGEGCVEIACPHLSSSKSSHPSYKKLRARIRKDTVFIVPAGHPFATVASGNENLEIVCFEVNAEGNIRYTLAGKKNIIKVMEKEAKELAFKMEGEEVDKVFGKQDEEFFFQGPEWRKEKEGRADEGGGGSIYRAIVEVEEDSGREQSCQRQFEEQQRFRNCQRYVKQEVQRGGRYNQRQESLRECCQELQEVDRRCRCQNLEQMVRQLQQQEQIKGEEVRELYETASELPRICSISPSQGCQFQSSY

SEQ ID NO: 130 - DNA, 381 bp, ARTIFICIAL SEQUENCE
  Synthetic
ctcgagcggaccaccatcaccaccatggaaatcgacgaggacatcgacaaccccagaagaagaggcgagggctgccaagagcagatccagcggcagcagaatctgaaccactgccagtactatctgaggcagcagagcagaagcggcggctacgacgaggataaccagagacagcacttcagacagtgctgccagcagctgagccagatcgaggaacagtgccagtgcgagggactgagacaagccgtgcggagacaacagcagcagcaaggactgcggggcgaagagatggaagaaatggtgcagagcgccagagatctgcccaaagagtgcggcatcagcagccagagatgcgagatccggcggagttggttcgaattc

SEQ ID NO: 131 - protein, 123 aa, ARTIFICIAL SEQUENCE
  Synthetic
RTTITTMEIDEDIDNPRRRGEGCQEQIQRQQNLNHCQYYLRQQSRSGGYDEDNQRQHFRQCCQQLSQIEEQCQCEGLRQAVRRQQQQQGLRGEEMEEMVQSARDLPKECGISSQRCEIRRSWF

SEQ ID NO: 132 - DNA, 1791 bp, ARTIFICIAL SEQUENCE
  Synthetic
ctcgagagaggccgggacgacgacgatgaggaaaaccccagagatccccgcgagcagtaccggcagtgccaagagtactgcagaaggcaaggccaaggccagagacagcagcagcagtgccagatcagatgcgaggaacggctggaagaggaccagcggagccaagaggaacgcgagcggagaagaggcagagatgtggacgaccagaacccccgggaccccgagcagagatacgagcagtgtcagcagcagtgtgaacggcagcggagaggccaagagcagacactgtgtcggcggagatgcgagcagcggcggcagcaagaggaaagagaacgccagcggggcagagacagacaagacccccagcagcagtaccaccggtgccagagaagatgccagatccaagaacagagccccgagcggcagcgccagtgccagcagagatgcgaaagacagtacaaagagcagcaaggcagagagaggggcccagaggccagccctagaagagagtccagaggacgggaagaagaacagcagcggcacaacccctactacttccacagccagagcatcagaagccggcacgagagcgaagagggcgaagtgaagtatctggaacggttcaccgagcggaccgagctgctgagaggcatcgagaactaccgggtcgtgattctggacgccaaccccaacacatccatgctgccccaccacaaggacgccgagtctgtggccgtcgtgacaaggggcagagccacactgacactggtgtcccaagagactcgcgagagcttcaatctggaatgcggcgacgtgatccgggtgccagctggggctacagtgtacgtgatcaaccaagacagcaacgagcggctggaaatggtcaagctgctgcagcccgtgaacaaccccggccagttcagagagtactacgccgctggcgccaagtcccccgaccagagctatctgcgggtgttcagcaacgacattctggtggccgctctgaatacccctcgggacagactggaaagattcttcgatcagcaagagcagcgcgagggcgtgatcatcagagccagccaagagaagctgcgggctctgagccagcacgccatgtctgctggacagaggccttggggcagaagaagctctggcggccctatctctctgaagtccgagagcccctcctacagcaaccagtttggccagttcttcgaggcttgccccgaggaacaccggcagctgcaagaaatggacgtgctcgtgaactacgccgagatcaagaggggcgccatgatggtgccccactacaacagcaaggccaccgtggtggtgtacgtggtggaaggcaccggcagatacgagatggcatgcccccacgtgtccagccagtcttacgagggccaaggacgcagagagcaagaagaggaagagtccaccggacggttccagaaagtgaccgccagactggccagaggcgacatcttcgtgatcccagccggacaccctatcgccatcaccgccagccagaacgagaatctgcggctgctgggcttcgacatcaacggcgagaacaaccagcgggactttctggccggacagaacaacatcatcaaccagctggaacgggaagccaaagaactgagcttcaacatgccccgcgaggaaatcgaagagattttcgagagccagatggaaagctacttcgtgcccaccgagcgccagagcagaaggggccaagggcgggatcacccactggcctctattctggatttcgccttcttcgaattc

SEQ ID NO: 133 - protein, 593 aa, ARTIFICIAL SEQUENCE
  Synthetic
RGRDDDDEENPRDPREQYRQCQEYCRRQGQGQRQQQQCQIRCEERLEEDQRSQEERERRRGRDVDDQNPRDPEQRYEQCQQQCERQRRGQEQTLCRRRCEQRRQQEERERQRGRDRQDPQQQYHRCQRRCQIQEQSPERQRQCQQRCERQYKEQQGRERGPEASPRRESRGREEEQQRHNPYYFHSQSIRSRHESEEGEVKYLERFTERTELLRGIENYRVVILDANPNTSMLPHHKDAESVAVVTRGRATLTLVSQETRESFNLECGDVIRVPAGATVYVINQDSNERLEMVKLLQPVNNPGQFREYYAAGAKSPDQSYLRVFSNDILVAALNTPRDRLERFFDQQEQREGVIIRASQEKLRALSQHAMSAGQRPWGRRSSGGPISLKSESPSYSNQFGQFFEACPEEHRQLQEMDVLVNYAEIKRGAMMVPHYNSKATVVVYVVEGTGRYEMACPHVSSQSYEGQGRREQEEEESTGRFQKVTARLARGDIFVIPAGHPIAITASQNENLRLLGFDINGENNQRDFLAGQNNIINQLEREAKELSFNMPREEIEEIFESQMESYFVPTERQSRRGQGRDHPLASILDFAFF

SEQ ID NO: 134 - DNA, 2172 bp, ARTIFICIAL SEQUENCE
  Synthetic
ctcgagcggaccaccatcaccaccatggaaatcgacgaggacatcgacaaccccagaagaagaggcgagggctgccaagagcagatccagcggcagcagaatctgaaccactgccagtactatctgaggcagcagagcagaagcggcggctacgacgaggataaccagagacagcacttcagacagtgctgccagcagctgagccagatcgaggaacagtgccagtgcgagggactgagacaagccgtgcggagacaacagcagcagcaaggactgcggggcgaagagatggaagaaatggtgcagagcgccagagatctgcccaaagagtgcggcatcagcagccagagatgcgagatccggcggagttggttcggcggagggggcagaggccgggacgacgacgatgaggaaaaccccagagatccccgcgagcagtaccggcagtgccaagagtactgcagaaggcaaggccaaggccagagacagcagcagcagtgccagatcagatgcgaggaacggctggaagaggaccagcggagccaagaggaacgcgagcggagaagaggcagagatgtggacgaccagaacccccgggaccccgagcagagatacgagcagtgtcagcagcagtgtgaacggcagcggagaggccaagagcagacactgtgtcggcggagatgcgagcagcggcggcagcaagaggaaagagaacgccagcggggcagagacagacaagacccccagcagcagtaccaccggtgccagagaagatgccagatccaagaacagagccccgagcggcagcgccagtgccagcagagatgcgaaagacagtacaaagagcagcaaggcagagagaggggcccagaggccagccctagaagagagtccagaggacgggaagaagaacagcagcggcacaacccctactacttccacagccagagcatcagaagccggcacgagagcgaagagggcgaagtgaagtatctggaacggttcaccgagcggaccgagctgctgagaggcatcgagaactaccgggtcgtgattctggacgccaaccccaacacatccatgctgccccaccacaaggacgccgagtctgtggccgtcgtgacaaggggcagagccacactgacactggtgtcccaagagactcgcgagagcttcaatctggaatgcggcgacgtgatccgggtgccagctggggctacagtgtacgtgatcaaccaagacagcaacgagcggctggaaatggtcaagctgctgcagcccgtgaacaaccccggccagttcagagagtactacgccgctggcgccaagtcccccgaccagagctatctgcgggtgttcagcaacgacattctggtggccgctctgaatacccctcgggacagactggaaagattcttcgatcagcaagagcagcgcgagggcgtgatcatcagagccagccaagagaagctgcgggctctgagccagcacgccatgtctgctggacagaggccttggggcagaagaagctctggcggccctatctctctgaagtccgagagcccctcctacagcaaccagtttggccagttcttcgaggcttgccccgaggaacaccggcagctgcaagaaatggacgtgctcgtgaactacgccgagatcaagaggggcgccatgatggtgccccactacaacagcaaggccaccgtggtggtgtacgtggtggaaggcaccggcagatacgagatggcatgcccccacgtgtccagccagtcttacgagggccaaggacgcagagagcaagaagaggaagagtccaccggacggttccagaaagtgaccgccagactggccagaggcgacatcttcgtgatcccagccggacaccctatcgccatcaccgccagccagaacgagaatctgcggctgctgggcttcgacatcaacggcgagaacaaccagcgggactttctggccggacagaacaacatcatcaaccagctggaacgggaagccaaagaactgagcttcaacatgccccgcgaggaaatcgaagagattttcgagagccagatggaaagctacttcgtgcccaccgagcgccagagcagaaggggccaagggcgggatcacccactggcctctattctggatttcgccttcttcgaattc

SEQ ID NO: 135 - protein, 720 aa, ARTIFICIAL SEQUENCE
  Synthetic
RTTITTMEIDEDIDNPRRRGEGCQEQIQRQQNLNHCQYYLRQQSRSGGYDEDNQRQHFRQCCQQLSQIEEQCQCEGLRQAVRRQQQQQGLRGEEMEEMVQSARDLPKECGISSQRCEIRRSWFGGGGRGRDDDDEENPRDPREQYRQCQEYCRRQGQGQRQQQQCQIRCEERLEEDQRSQEERERRRGRDVDDQNPRDPEQRYEQCQQQCERQRRGQEQTLCRRRCEQRRQQEERERQRGRDRQDPQQQYHRCQRRCQIQEQSPERQRQCQQRCERQYKEQQGRERGPEASPRRESRGREEEQQRHNPYYFHSQSIRSRHESEEGEVKYLERFTERTELLRGIENYRVVILDANPNTSMLPHHKDAESVAVVTRGRATLTLVSQETRESFNLECGDVIRVPAGATVYVINQDSNERLEMVKLLQPVNNPGQFREYYAAGAKSPDQSYLRVFSNDILVAALNTPRDRLERFFDQQEQREGVIIRASQEKLRALSQHAMSAGQRPWGRRSSGGPISLKSESPSYSNQFGQFFEACPEEHRQLQEMDVLVNYAEIKRGAMMVPHYNSKATVVVYVVEGTGRYEMACPHVSSQSYEGQGRREQEEEESTGRFQKVTARLARGDIFVIPAGHPIAITASQNENLRLLGFDINGENNQRDFLAGQNNIINQLEREAKELSFNMPREEIEEIFESQMESYFVPTERQSRRGQGRDHPLASILDFAFF

SEQ ID NO: 136 - skipped

SEQ ID NO: 137 - protein, 371 aa, ARTIFICIAL SEQUENCE
  Synthetic
AEDLQEILPVNETRRLTTSGAYNIIDGCWRGKADWAENRKALADCAQGFGKGTVGGKDGDIYTVTSELDDDVANPKEGTLRFGAAQNRPLWIIFERDMVIRLDKEMVVNSDKTIDGRGAKVEIINAGFTLNGVKNVIIHNINMHDVKVNPGGLIKSNDGPAAPRAGSDGDAISISGSSQIWIDHCSLSKSVDGLVDAKLGTTRLTVSNSLFTQHQFVLLFGAGDENIEDRGMLATVAFNTFTDNVDQRMPRCRHGFFQVVNNNYDKWGSYAIGGSASPTILSQGNRFCAPDERSKKNVLGRHGEAAAESMKWNWRTNKDVLENGAIFVASGVDPVLTPEQSAGMIPAEPGESALSLTSSAGVLSCQPGAPC

SEQ ID NO: 138-140 - skipped (3 entries)

SEQ ID NO: 141 - protein, 159 aa, ARTIFICIAL SEQUENCE
  Synthetic
GVFNYETETTSVIPAARLFKAFILDGDNLFPKVAPQAISSVENIEGNGGPGTIKKISFPEGFPFKYVKDRVDEVDHTNFKYNYSVIEGGPIGDTLEKISNEIKIVATPDGGSILKISNKYHTKGDHEVKAEQVKASKEMGETLLRAVESYLLAHSDAYN

SEQ ID NO: 142-144 - skipped (3 entries)

SEQ ID NO: 145 - protein, 156 aa, ARTIFICIAL SEQUENCE
  Synthetic
QDTPALGKDTVAVSGKWYLKAMTADQEVPEKPDSVTPMILKAQKGGNLEAKITMLTNGQCQNITVVLHKTSEPGKYTAYEGQRVVFIQPSPVRDHYILYCEGELHGRQIRMAKLLGRDPEQSQEALEDFREFSRAKGLNQEILELAQSETCSPGGQ

SEQ ID NO: 146-148 - skipped (3 entries)

SEQ ID NO: 149 - protein, 246 aa, ARTIFICIAL SEQUENCE
  Synthetic
AIGDKPGPNITATYGSKWLEARATFYGSNPRGAAPDDHGGACGYKDVDKPPFDGMTACGNEPIFKDGLGCRACYEIKCKEPVECSGEPVLVKITDKNYEHIAAYHFDLSGKAFGAMAKKGQEDKLRKAGELTLQFRRVKCKYPSGTKITFHIEKGSNDHYLALLVKYAAGDGNIVAVDIKPRDSDEFIPMKSSWGAIWRIDPKKPLKGPFSIRLTSEGGAHLVQDDVIPANWKPDTVYTSKLQFGA

SEQ ID NO: 150-152 - skipped (3 entries)

SEQ ID NO: 153 - protein, 303 aa, ARTIFICIAL SEQUENCE
  Synthetic
RPASIKTFEEFKKAFNKNYATVEEEEVARKNFLESLKYVEANKGAINHLSDLSLDEFKNRYLMSAEAFEQLKTQFDLNAETSACRINSVNVPSELDLRSLRTVTPIRMQGGCGSCWAFSGVAATESAYLAYRNTSLDLSEQELVDCASQHGCHGDTIPRGIEYIQQNGVVEERSYPYVAREQRCRRPNSQHYGISNYCQIYPPDVKQIREALTQTHTAIAVIIGIKDLRAFQHYDGRTIIQHDNGYQPNYHAVNIVGYGSTQGDDYWIVRNSWDTTWGDSGYGYFQAGNNLMMIEQYPYVVIM

SEQ ID NO: 154-156 - skipped (3 entries)

SEQ ID NO: 157 - protein, 223 aa, ARTIFICIAL SEQUENCE
  Synthetic
TSACRINSVNVPSELDLRSLRTVTPIRMQGGCGSCWAFSGVAATESAYLAYRNTSLDLSEQELVDCASQHGCHGDTIPRGIEYIQQNGVVEERSYPYVAREQRCRRPNSQHYGISNYCQIYPPDVKQIREALTQTHTAIAVIIGIKDLRAFQHYDGRTIIQHDNGYQPNYHAVNIVGYGSTQGDDYWIVRNSWDTTWGDSGYGYFQAGNNLMMIEQYPYVVIM

SEQ ID NO: 158-160 - skipped (3 entries)

SEQ ID NO: 161 - protein, 129 aa, ARTIFICIAL SEQUENCE
  Synthetic
DQVDVKDCANHEIKKVLVPGCHGSEPCIIHRGKPFQLEAVFEANQNTKTAKIEIKASIDGLEVDVPGIDPNACHYMKCPLVKGQQYDIKYTWNVPKIAPKSENVVVTVKVMGDDGVLACAIATHAKIRD

SEQ ID NO: 162-164 - skipped (3 entries)

SEQ ID NO: 165 - protein, 129 aa, ARTIFICIAL SEQUENCE
  Synthetic
DQVDVKDCANNEIKKVMVDGCHGSDPCIIHRGKPFTLEALFDANQNTKTAKIEVKASLDGLEIDVPGIDTNACHFVKCPLVKGQQYDIKYTWNVPKIAPKSENVVVTVKLIGDNGVLACAIATHGKIRD

SEQ ID NO: 166-168 - skipped (3 entries)

SEQ ID NO: 169 - protein, 212 aa, ARTIFICIAL SEQUENCE
  Synthetic
TNACSINGNAPAEIDLRQMRTVTPIRSGVAATESAYLAYRNQSLDLAEQELVDCASQHNGCHGDTIPRGIEYIQHNGVVQESYYRYVAREQSCRRPNAQRFGISNYCQIYPQNVNKIREALAQTHSAIAVIIGIKDLDAFRHYDGRTIIQRDNGYQPNYHAVNIVGYSNAQGVDYWIVRNSWDTNWGDNGYGYFAANIDLMMIEEYPYVVIL

SEQ ID NO: 170-172 - skipped (3 entries)

SEQ ID NO: 173 - protein, 177 aa, ARTIFICIAL SEQUENCE
  Synthetic
EICPAVKRDVDLFLTGTPDEYVEQVAQYKALPVVLENARILKNCVDAKMTEEDKENALSLLDKIYTSPLCGGGGSGGGGSGGGGSVKMAETCPIFYDVFFAVANGNELLLDLSLTKVNATEPERTAMKKIQDCYVENGLISRVLDGLVMTTISSSKDCMGEAVQNTVEDLKLNTLGR

SEQ ID NO: 174 - protein, 162 aa, ARTIFICIAL SEQUENCE
  Synthetic
EICPAVKRDVDLFLTGTPDEYVEQVAQYKALPVVLENARILKNCVDAKMTEEDKENALSLLDKIYTSPLCVKMAETCPIFYDVFFAVANGNELLLDLSLTKVNATEPERTAMKKIQDCYVENGLISRVLDGLVMTTISSSKDCMGEAVQNTVEDLKLNTLGR

SEQ ID NO: 175-177 - skipped (3 entries)

SEQ ID NO: 178 - protein, 584 aa, ARTIFICIAL SEQUENCE
  Synthetic
EAHQSEIAHRFNDLGEEHFRGLVLVAFSQYLQQCPFEDHVKLVNEVTEFAKGCVADQSAANCEKSLHELLGDKLCTVASLRDKYGEMADCCEKKEPERNECFLQHKDDNPGFGQLVTPEADAMCTAFHENEQRFLGKYLYEIARRHPYFYAPELLYYAEEYKGVFTECCEAADKAACLTPKVDALREKVLASSAKERLKCASLQKFGERAFKAWSVARLSQKFPKAEFAEISKLVTDLAKIHKECCHGDLLECADDRADLAKYICENQDSISTKLKECCGKPVLEKSHCISEVERDELPADLPPLAVDFVEDKEVCKNYQEAKDVFLGTFLYEYSRRHPEYSVSLLLRLAKEYEATLEKCCATDDPPACYAHVFDEFKPLVEEPHNLVKTNCELFEKLGEYGFQNALLVRYTKKVPQVSTPTLVEVSRSLGKVGSKCCTHPEAERLSCAEDYLSVVLNRLCVLHEKTPVSERVTKCCTESLVNRRPCFSALQVDETYVPKEFSAETFTFHADLCTLPEAEKQIKKQSALVELLKHKPKATEEQLKTVMGDFGSFVDKCCAAEDKEACFAEEGPKLVAAAQAALA

SEQ ID NO: 179-181 - skipped (3 entries)

SEQ ID NO: 182 - protein, 171 aa, ARTIFICIAL SEQUENCE
  Synthetic
HEEENVVRSNIDISKISGEWYSILLASDVKEKIEENGSMRVFVEHIKALDNSSLSFVFHTKENGKCTEIFLVADKTKDGVYTVVYDGYNVFSIVETVYDEYILLHLLNFDKTRPFQLVEFYAREPDVSQKLKEKFVKYCQEHGIVNILDLTEVDRCLQARGSEVAQDSSVE

SEQ ID NO: 183-185 - skipped (3 entries)

SEQ ID NO: 186 - protein, 284 aa, ARTIFICIAL SEQUENCE
  Synthetic
MDAIKKKMQAMKLEKDNAMDRADTLEQQNKEANNRAEKSEEEVHNLQKRMQQLENDLDQVQESLLKANIQLVEKDKALSNAEGEVAALNRRIQLLEEDLERSEERLNTATTKLAEASQAADESERMRKVLENRSLSDEERMDALENQLKEARFLAEEADRKYDEVARKLAMVEADLERAEERAETGESKIVELEEELRVVGNNLKSLEVSEEKANQREEAYKEQIKTLTNKLKAAEARAEFAERSVQKLQKEVDRLEDELVNEKEKYKSITDELDQTFSELSGY

SEQ ID NO: 187-189 - skipped (3 entries)

SEQ ID NO: 190 - protein, 247 aa, ARTIFICIAL SEQUENCE
  Synthetic
ADAGYTPAAAATPATPAATPAAAGGKATTDEQKLLEDVNAGFKAAVAAAANAPPADKFKIFEAAFSESSKGLLATSAAKAPGLIPKLDTAYDVAYKAAEATPEAKYDAFVTALTEALRVIAGALEVHAVKPATEEVLAAKIPTGELQIVDKIDAAFKIAATAANAAPTNDKFTVFESAFNKALNECTGGAYETYKFIPSLEAAVKQAYAATVAAAPEVKYAVFEAALTKAITAMTQAQKAGKPAAAA

SEQ ID NO: 191-193 - skipped (3 entries)

SEQ ID NO: 194 - protein, 240 aa, ARTIFICIAL SEQUENCE
  Synthetic
IPKVPPGPNITATYGDKWLDAKSTWYGKPTGAGPKDNGGACGYKDVDKPPFSGMTGCGNTPIFKSGRGCGSCFEIKCTKPEACSGEPVVVHITDDNEEPIAPYHFDLSGHAFGAMAKKGDEQKLRSAGELELQFRRVKCKYPEGTKVTFHVEKGSNPNYLALLVKYVNGDGDVVAVDIKEKGKDKWIELKESWGAIWRIDTPDKLTGPFTVRYTTEGGTKTEAEDVIPEGWKADTSYESK

SEQ ID NO: 195-197 - skipped (3 entries)

SEQ ID NO: 198 - protein, 264 aa, ARTIFICIAL SEQUENCE
  Synthetic
AADLGYGPATPAAPAAGYTPATPAAPAEAAPAGKATTEEQKLIEKINAGFKAALAAAAGVQPADKYRTFVATFGAASNKAFAEGLSGEPKGAAESSSKAALTSKLDAAYKLAYKTAEGATPEAKYDAYVATLSEALRIIAGTLEVHAVKPAAEEVKVIPAGELQVIEKVDAAFKVAATAANAAPANDKFTVFEAAFNDAIKASTGGAYESYKFIPALEAAVKQAYAATVATAPEVKYTVFETALKKAITAMSEAQKAAKPAAAA

SEQ ID NO: 199-200 - skipped (2 entries)

SEQ ID NO: 201 - protein, 536 aa, ARTIFICIAL SEQUENCE
  Synthetic
SIKRDHNDYSKNPMRIVCYVGTWSVYHKVDPYTIEDIDPFKCTHLMYGFAKIDEYKYTIQVFDPYQDDNHNSWEKRGYERFNNLRLKNPELTTMISLGGWYEGSEKYSDMAANPTYRQQFIQSVLDFLQEYKFDGLDLDWEYPGSRLGNPKIDKQNYLALVRELKDAFEPHGYLLTAAVSPGKDKIDRAYDIKELNKLFDWMNVMTYDYHGGWENFYGHNAPLYKRPDETDELHTYFNVNYTMHYYLNNGATRDKLVMGVPFYGRAWSIEDRSKLKLGDPAKGMSPPGFISGEEGVLSYIELCQLFQKEEWHIQYDEYYNAPYGYNDKIWVGYDDLASISCKLAFLKELGVSGVMVWSLENDDFKGHCGPKNPLLNKVHNMINGDEKNSFECILGPSTTTPTPTTTPTTPTTTPTTPSPTTPTTTPSPTTPTTTPSPTTPTTTPSPTTPTPTTPTPAPTTSTPSPTTTEHTSETPKYTTYVDGHLIKCYKEGDIPHPTNIHKYLVCEFVNGGWWVHIMPCPPGTIWCQEKLTCIGE

SEQ ID NO: 202 - protein, 424 aa, ARTIFICIAL SEQUENCE
  Synthetic
SNIRPNVATLEPKTVCYYESWVHWRQGEGKMDPEDIDTSLCTHIVYSYFGIDAATHEIKLLDEYLMKDLHDMEHFTQHKGNAKAMIAVGGSTMSDQFSKTAAVEHYRETFVVSTVDLMTRYGFDGVMIDWSGMQAKDSDNFIKLLDKFDENYNIPAISNYVDFMNVLSLDYTGSWAHTVGHASPFPEQLKTLEAYHKRGAPRHKMVMAVPFYARTWILEKMNKQDIGDKASGPGPRGQFTQTDGFLSYNELCVQIQAETNAFTITRDHDNTAIYAVYVHSNHAEWISFEDRHTLGEKAKNITQQGYAGMSVYTLSNEDVHGVCGDKNPLLHAIQSNYYHGVVTEPTVVTLPPVTHTTEHVTDIPGVFHCHEEGFFRDKTYCATYYECKKGDFGLEKTVHHCANHLQAFDEVSRTCIDHTKIPGC

SEQ ID NO: 203 - protein, 478 aa, ARTIFICIAL SEQUENCE
  Synthetic
NPRFKRDNRDDVLKQTEELIKSAQDVLEKLPDSDLKDEIAEKLATMKHYKHELENAKNPIKIAHFELELLTMFKKFQSLLNEANEIIKSLTTTTTEPTTPTPEPTTTTPEPTTKTPEPTTKTPEPTTPTPEPTTKTPEPTTKTPEPTTPTPEPTTKTPEPTTPTPEPTTKTPEPTTKTPEPSTPTPEPTTKTPEPTTKTPEPSTPTPEPTTKTPEPSTPTPEPTTKTPEPTTKTPEPSTPTPEPTTKTPEPSTPTPEPTTKTPEPSTTKKPNRDDVLKQAEELIKRAEDVFEKLPDSDLKNEIAEKLATMKNYKHELENAKNPIKIAHLESELLTMFKMFQSLLNEADEIIRSLTTTTEPTTLNSTTPEPTTLNSTTPEPTTLNSTTPEPTTLNSTTPEPTTLNSTTPEPTTLNSTTPEPTTLNSTTPEPTTLNSTTPEPTTSNSTTSEPTNSINRKTSEISFLSDWFHKIRTRFNIF

SEQ ID NO: 204 - protein, 158 aa, ARTIFICIAL SEQUENCE
  Synthetic
EDIWKVNKKCTSGGKNQDRKLDQIIQKGQQVKIQNICKLIRDKPHTNQEKEKCMKFCKKVCKGYRGACDGNICYCSRPSNLGPDWKVSKECKDPNNKDSRPTEIVPYRQQLAIPNICKLKNSETNEDSKCKKHCKEKCRGGNDAGCDGNFCYCRPKNK

SEQ ID NO: 205 - protein, 965 aa, ARTIFICIAL SEQUENCE
  Synthetic
SIKRDHNDYSKNPMRIVCYVGTWSVYHKVDPYTIEDIDPFKCTHLMYGFAKIDEYKYTIQVFDPYQDDNHNSWEKRGYERFNNLRLKNPELTTMISLGGWYEGSEKYSDMAANPTYRQQFIQSVLDFLQEYKFDGLDLDWEYPGSRLGNPKIDKQNYLALVRELKDAFEPHGYLLTAAVSPGKDKIDRAYDIKELNKLFDWMNVMTYDYHGGWENFYGHNAPLYKRPDETDELHTYFNVNYTMHYYLNNGATRDKLVMGVPFYGRAWSIEDRSKLKLGDPAKGMSPPGFISGEEGVLSYIELCQLFQKEEWHIQYDEYYNAPYGYNDKIWVGYDDLASISCKLAFLKELGVSGVMVWSLENDDFKGHCGPKNPLLNKVHNMINGDEKNSFECILGPSTTTPTPTTTPTTPTTTPTTPSPTTPTTTPSPTTPTTTPSPTTPTTTPSPTTPTPTTPTPAPTTSTPSPTTTEHTSETPKYTTYVDGHLIKCYKEGDIPHPTNIHKYLVCEFVNGGWWVHIMPCPPGTIWCQEKLTCIGEGPGPGSNIRPNVATLEPKTVCYYESWVHWRQGEGKMDPEDIDTSLCTHIVYSYFGIDAATHEIKLLDEYLMKDLHDMEHFTQHKGNAKAMIAVGGSTMSDQFSKTAAVEHYRETFVVSTVDLMTRYGFDGVMIDWSGMQAKDSDNFIKLLDKFDENYNIPAISNYVDFMNVLSLDYTGSWAHTVGHASPFPEQLKTLEAYHKRGAPRHKMVMAVPFYARTWILEKMNKQDIGDKASGPGPRGQFTQTDGFLSYNELCVQIQAETNAFTITRDHDNTAIYAVYVHSNHAEWISFEDRHTLGEKAKNITQQGYAGMSVYTLSNEDVHGVCGDKNPLLHAIQSNYYHGVVTEPTVVTLPPVTHTTEHVTDIPGVFHCHEEGFFRDKTYCATYYECKKGDFGLEKTVHHCANHLQAFDEVSRTCIDHTKIPGC

SEQ ID NO: 206 - protein, 965 aa, ARTIFICIAL SEQUENCE; identical to SEQ ID NO: 205
  Synthetic

SEQ ID NO: 207 - protein, 134 aa, ARTIFICIAL SEQUENCE
  Synthetic
IIYPGTLWCGHGNKSSGPNELGRFKHTDACCRTHDMCPDVMSAGESKHGLTNTASHTRLSCDCDDKFYDCLKNSADTISSYFVGKMYFNLIDTKCYKLEHPVTGCGERTEGRCLHYTVDKSKPKVYQWFDLRKY

SEQ ID NO: 208 - protein, 349 aa, ARTIFICIAL SEQUENCE
  Synthetic
PDNNKTVREFNVYWNVPTFMCHKYGLRFEEVSEKYGILQNWMDKFRGEEIAILYDPGMFPALLKDPNGNVVARNGGVPQLGNLTKHLQVFRDHLINQIPDKSFPGVGVIDFESWRPIFRQNWASLQPYKKLSVEVVRREHPFWDDQRVEQEAKRRFEKYGQLFMEETLKAAKRMRPAANWGYYAYPYCYNLTPNQPSAQCEATTMQENDKMSWLFESEDVLLPSVYLRWNLTSGERVGLVGGRVKEALRIARQMTTSRKKVLPYYWYKYQDRRDTDLSRADLEATLRKITDLGADGFIIWGSSDDINTKAKCLQFREYLNNELGPAVKRIALNNNANDRLTVDVSVDQV

SEQ ID NO: 209 - protein, 373 aa, ARTIFICIAL SEQUENCE
  Synthetic
ELKQINVIFRHGDRIPDEKNEMYPKDPYLYYDFYPLERGELTNSGKMREYQLGQFLRERYGDFLGDIYTEESVSALSSFYDRTKMSLQLVLAALYPPNKLQQWNEDLNWQPIATKYLRRYEDNIFLPEDCLLFTIELDRVLESPRGKYEFSKYDKLKKKLEEWTGKNITTPWDYYYIYHTLVAEQSYGLTLPSWTNNIFPRGELFDATVFTYNITNSTPLLKKLYGGPLLRIFTKHMLDVVSGTQKKKRKIYLFSGHESNIASVLHALQLYYPHVPEYSSSIIMELHNIEGTHYVKIVYYLGIPSEARELQLPGCEVLCPLYKYLQLIENVIPSNEELICDKRFVDESANNLSIEELDFVKLNLIRIAGTENK

SEQ ID NO: 210 - protein, 752 aa, ARTIFICIAL SEQUENCE
  Synthetic
KSVPRVIDQDLERYEPLEEEDHRGARVPFNLEETYDQSFRANSFNGTWKTDREILYSDNYVGDIRLFDVTTGSGTVLLDSSVTADFDKASVMFSFDNSHVAIGHDYVNGFRYSIHQKCTVYNIKSRTFTDIANGDRIPLFKWSPTRNALIYVHKNDIYYQVFFEGGSDTRRITNTGVPDIVFNGIPDWVYEEEVLGSPVAFWISPDGRHLAFATFNDTNVRDIVISKYGSPGNSRDQYPNEIRIKYPKAGTTNPFVSLSVIDLHDPSSKLIDLPPPVDVVGADNVLYTANWRRDGEIVATWTNRVQNKAQLVLYDTKGNANNIYYEEETEGWLRIQPPLYHDRYVIVAKLQDSGTKAGRFLHATRLEYRNGALVDETDLTPGTCEVISLLLVDHARARLYYLGTELGKPSHKNLYSVQLSGNEPPVCLSCDVLTPEGNRCTYAYAYFSTNGSHYALYCAGPDPVFIAIVNANHRQISIWEENRSLRRKLAARTQPIVKNFNVNANGYTNKVKLYLPPDFDETKKYPLLITVYAGPNTIRITEEATYGFESYIVTNRSVIYGRIDGRGSAYKGSKMLFEIYRRLGTVEIEDQIIITRTLQEKYSWIDSNRTGIWGWSYGGFSAAMVLATDAESVFKCGISVAPVTSWIYYDSLYTERFMGLPTPEDNQSGYNDTDVSRRVEGMRGKKYMLIHGTADDNVHYQQTMMLNKALVNSDIMFQQQTYTDEAHALGNVFPHLYHTTDRFWANCLGYSH

SEQ ID NO: 211 - protein, 204 aa, ARTIFICIAL SEQUENCE
  Synthetic
FPGAHDEDSKEERKNVDTVLVLPSIERDQMMAATFDFPSLSFEDSDEGSNWNWNTLLRPNFLDGWYQTLQSAISAHMKKVREQMAGILSRIPEQGVVNWNKIPEGANTTSTTKIIDGHVVTINETTYTDGSDDYSTLIRVRVIDVRPQNETILTTVSSEADSDVTTLPTLIGKNETSTQSSRSVESVEDFDNEIPKNQGDVLTA

SEQ ID NO: 212 - protein, 300 aa, ARTIFICIAL SEQUENCE
  Synthetic
GPKCPFNSDTVSIIIETRENRNRDLYTLQTLQNHPEFKKKTITRPVVFITHGFTSSASETNFINLAKALVDKDNYMVISIDWQTAACTNEAAGLKYLYYPTAARNTRLVGQYIATITQKLVKHYKISMANIRLIGHSLGAHASGFAGKKVQELKLGKYSEIIGLDPARPSFDSNHCSERLCETDAEYVQIIHTSNYLGTEKTLGTVDFYMNNGKNQPGCGRFFSEVCSHSRAVIYMAECIKHECCLIGIPKSKSSQPISSCTKQECVCVGLNAKKYPSRGSFYVPVESTAPFCNNKGKII

SEQ ID NO: 213 - protein, 331 aa, ARTIFICIAL SEQUENCE
  Synthetic
SERPKRVFNIYWNVPTFMCHQYDLYFDEVTNFNIKRNSKDDFQGDKIAIFYDPGEFPALLSLKDGKYKKRNGGVPQEGNITIHLQKFIENLDKIYPNRNFSGIGVIDFERWRPIFRQNWGNMKIHKNFSIDLVRNEHPTWNKKMIELEASKRFEKYARFFMEETLKLAKKTRKQADWGYYGYPYCFNMSPNNLVPECDVTAMHENDKMSWLFNNQNVLLPSVYVRQELTPDQRIGLVQGRVKEAVRISNNLKHSPKVLSYWWYVYQDETNTFLTETDVKKTFQEIVINGGDGIIIWGSSSDVNSLSKCKRLQDYLLTVLGPIAINVTEAVN

SEQ ID NO: 214 - protein, 751 aa, ARTIFICIAL SEQUENCE
  Synthetic
RVIDKDNSDRIVKTQNDQNLSKVPFNLEETYTADFLAYVFNGTWTSDTTIVYTDRRTGDILQFDVIKQRSTLIVDSSVMDAYIVSNYVLSPKGRYLLIGYDLKKGYRYSTFMRYVIYDIEHRAYHKIGNDMHIALAKWAPLTDDLIYILDNDIYYMRFSNNGFNDVQRVTYDGISGIVYNGVPDWVYEEEVLQDSSAIWFSPDGNHLAYASFDDRNVQEILYLHYGEPGNLDDQYPTEVKIKYPKVGTLNPVVSLTLVDLHDPTLNKIDLKAPHYAVGTDNLLYNVQWKDFDHVVVTWSNRVQNKTEIVWYNMYGEIVKTLHVVEHKGWLDIKHLFFYKGSVYIRKLQPSGTKAGRFHHVTRYDETFKQSPTQMDLTPDAIEVQNICTIDQSNGRIYYLASGLGKPSQKNLYSVPADGSEKPTCISCNVLTPEGNVCTYADAIFSPLGQYYVLVCHGPDPAFVSIFNNAHQKVYSWENNLSLRKKLAKRHLPLVKDLDVRANGYESKVRLFLPHNFDESKSYPMLVNVYAGPNTLKIIDAASYGHQVYMTTNRSVIYAYIDGRGSSNKGSKMLFSIYRKLGTVEVEDQITVTRQLQEMFPWIDSKRTGVWGWSYGGFSTAMILAKDTSFVFKCGIAIAPVSSWIYYDSIYTERFMGFPTPEDNLSGYNETDVSRRVEDIRGKKFMLIHGSGDDNVHYQQSLALAKALEKADVMFEQITYTDEAHALFGVLPHLYHTMDRFWSDCFSLSHAH

SEQ ID NO: 215 - protein, 204 aa, ARTIFICIAL SEQUENCE
  Synthetic
NNYCKIKCLKGGVHTACKYGSLKPNCGNKVVVSYGLTKQEKQDILKEHNDFRQKIARGLETRGNPGPQPPAKNMKNLVWNDELAYVAQVWANQCQYGHDTCRDVAKYQVGQNVALTGSTAAKYDDPVKLVKMWEDEVKDYNPKKKFSGNDFLKTGHYTQMVWANTKEVGCGSIKYIQEKWHKHYLVCNYGPSGNFMNEELYQTK

SEQ ID NO: 216 - protein, 302 aa, ARTIFICIAL SEQUENCE
  Synthetic
GITPDCTFNEKDIELHVYSRDKRNGIILKKEILKNYDLFQKSQISHQIAILIHGFLSTGNNENFDAMAKALIEIDNFLVISVDWKKGACNAFASTNDVLGYSQAVGNTRHVGKYVADFTKLLVEQYKVPMSNIRLIGHSLGAHTSGFAGKEVQRLKLGKYKEIIGLDPAGPSFLTNKCPNRLCETDAEYVQAIHTSAILGVYYNVGSVDFYVNYGKSQPGCSEPSCSHTKAVKYLTECIKRECCLIGTPWKSYFSTPKPISQCKRDTCVCVGLNAQSYPAKGSFYVPVDKDAPYCHNEGIKL

SEQ ID NO: 217 - protein, 206 aa, ARTIFICIAL SEQUENCE
  Synthetic
NDYCKIKCSSGVHTVCQYGESTKPSKNCAGKLIKSVGPTEEEKKLIVEEHNRFRQKVAKGLETRGNPGPQPAASNMNNLVWNDELAKIAQVWASQCQILVHDKCRNTEKYQVGQNIAYAGSSNHFPSVTKLIQLWENEVKDFNYNTGITNKNFGKVGHYTQMVWGNTKEVGCGSLKYVEKNMQIHYLICNYGPAGNYLGQPIYTKK

SEQ ID NO: 218 - protein, 626 aa, ARTIFICIAL SEQUENCE
  Synthetic
MRGRVSPLMLLLGILVLASVSATHAKSSPYQKKTENPCAQRCLQSCQQEPDDLKQKACESRCTKLEYDPRCVYDPRGHTGTTNQRSPPGERTRGRQPGDYDDDRRQPRREEGGRWGPAGPREREREEDWRQPREDWRRPSHQQPRKIRPEGREGEQEWGTPGSHVREETSRNNPFYFPSRRFSTRYGNQNGRIRVLQRFDQRSRQFQNLQNHRIVQIEAKPNTLVLPKHADADNILVIQQGQATVTVANGNNRKSFNLDEGHALRIPSGFISYILNRHDNQNLRVAKISMPVNTPGQFEDFFPASSRDQSSYLQGFSRNTLEAAFNAEFNEIRRVLLEENAGGEQEERGQRRWSTRSSENNEGVIVKVSKEHVEELTKHAKSVSKKGSEEEGDITNPINLREGEPDLSNNFGKLFEVKPDKKNPQLQDLDMMLTCVEIKEGALMLPHFNSKAMVIVVVNKGTGNLELVAVRKEQQQRGRREEEEDEDEEEEGSNREVRRYTARLKEGDVFIMPAAHPVAINASSELHLLGFGINAENNHRIFLAGDKDNVIDQIEKQAKDLAFPGSGEQVEKLIKNQKESHFVSARPQSQSQSPSSPEKESPEKEDQEEENQGGKGPLLSILKAFN

SEQ ID NO: 219 - protein, 169 aa, ARTIFICIAL SEQUENCE
  Synthetic
LTILVAPALFLLAAHASARQQWELQGDRRCQSQLERANLRPCEQHLMQKIQRDEDSYGRDPYSPSQDPYSPSQDPDRRDPYSPSPYDRRGAGSSQHQERCCNELNEFENNQRCMCEALQQIMENQSDRLQGRQQEQQFKRELRNLPQQCGLRAPQRCDLEVESGGRDRY

SEQ ID NO: 220 - protein, 512 aa, ARTIFICIAL SEQUENCE
  Synthetic
MAKLLALSLCFCVLVLGASSVTFRQGGEENECQFQRLNAQRPDNRIESEGGYIETWNPNNQEFQCAGVALSRTVLRRNALRRPFYSNAPLEIYVQQGSGYFGLIFPGCPSTYEEPAQEGRRYQSQKPSRRFQVGQDDPSQQQQDSHQKVHRFDEGDLIAVPTGVAFWMYNDEDTDVVTVTLSDTSSIHNQLDQFPRRFYLAGNQEQEFLRYQQQQGSRPHYRQISPRVRGDEQENEGSNIFSGFAQEFLQHAFQVDRQTVENLRGENEREEQGAIVTVKGGLRILSPDEEDESSRSPPNRREEFDEDRSRPQQRGKYDENRRGYKNGIEETICSASVKKNLGRSSNPDIYNPQAGSLRSVNELDLPILGWLGLSAQHGTIYRNAMFVPHYTLNAHTIVVALNGRAHVQVVDSNGNRVYDEELQEGHVLVVPQNFAVAAKAQSENYEYLAFKTDSRPSIANQAGENSIIDNLPEEVVANSYRLPREQARQLKNNNPFKFFVPPFDHQSMREVA

SEQ ID NO: 221 - protein, 1270 aa, ARTIFICIAL SEQUENCE
  Synthetic
KSSPYQKKTENPCAQRCLQSCQQEPDDLKQKACESRCTKLEYDPRCVYDPRGHTGTTNQRSPPGERTRGRQPGDYDDDRRQPRREEGGRWGPAGPREREREEDWRQPREDWRRPSHQQPRKIRPEGREGEQEWGTPGSHVREETSRNNPFYFPSRRFSTRYGNQNGRIRVLQRFDQRSRQFQNLQNHRIVQIEAKPNTLVLPKHADADNILVIQQGQATVTVANGNNRKSFNLDEGHALRIPSGFISYILNRHDNQNLRVAKISMPVNTPGQFEDFFPASSRDQSSYLQGFSRNTLEAAFNAEFNEIRRVLLEENAGGEQEERGQRRWSTRSSENNEGVIVKVSKEHVEELTKHAKSVSKKGSEEEGDITNPINLREGEPDLSNNFGKLFEVKPDKKNPQLQDLDMMLTCVEIKEGALMLPHFNSKAMVIVVVNKGTGNLELVAVRKEQQQRGRREEEEDEDEEEEGSNREVRRYTARLKEGDVFIMPAAHPVAINASSELHLLGFGINAENNHRIFLAGDKDNVIDQIEKQAKDLAFPGSGEQVEKLIKNQKESHFVSARPQSQSQSPSSPEKESPEKEDQEEENQGGKGPLLSILKAFNGGGGLTILVAPALFLLAAHASARQQWELQGDRRCQSQLERANLRPCEQHLMQKIQRDEDSYGRDPYSPSQDPYSPSQDPDRRDPYSPSPYDRRGAGSSQHQERCCNELNEFENNQRCMCEALQQIMENQSDRLQGRQQEQQFKRELRNLPQQCGLRAPQRCDLEVESGGRDRYGGGGVTFRQGGEENECQFQRLNAQRPDNRIESEGGYIETWNPNNQEFQCAGVALSRTVLRRNALRRPFYSNAPLEIYVQQGSGYFGLIFPGCPSTYEEPAQEGRRYQSQKPSRRFQVGQDDPSQQQQDSHQKVHRFDEGDLIAVPTGVAFWMYNDEDTDVVTVTLSDTSSIHNQLDQFPRRFYLAGNQEQEFLRYQQQQGSRPHYRQISPRVRGDEQENEGSNIFSGFAQEFLQHAFQVDRQTVENLRGENEREEQGAIVTVKGGLRILSPDEEDESSRSPPNRREEFDEDRSRPQQRGKYDENRRGYKNGIEETICSASVKKNLGRSSNPDIYNPQAGSLRSVNELDLPILGWLGLSAQHGTIYRNAMFVPHYTLNAHTIVVALNGRAHVQVVDSNGNRVYDEELQEGHVLVVPQNFAVAAKAQSENYEYLAFKTDSRPSIANQAGENSIIDNLPEEVVANSYRLPREQARQLKNNNPFKFFVPPFDHQSMREVA

SEQ ID NO: 222 - protein, 374 aa, ARTIFICIAL SEQUENCE
  Synthetic
MDSPCLVALLVFSFVIGSCFSDNPIDSCWRGDSNWAQNRMKLADCAVGFGSSTMGGKGGDLYTVTNSDDDPVNPAPGTLRYGATRDRPLWIIFSGNMNIKLKMPMYIAGYKTFDGRGAQVYIGNGGPCVFIKRVSNVIIHGLYLYGCSTSVLGNVLINESFGVEPVHPQDGDALTLRTATNIWIDHNSFSNSSDGLVDVTLTSTGVTISNNLFFNHHKVMSLGHDDAYSDDKSMKVTVAFNQFGPNCGQRMPRARYGLVHVANNNYDPWTIYAIGGSSNPTILSEGNSFTAPNESYKKQVTIRIGCKTSSSCSNWVWQSTQDVFYNGAYFVSSGKYEGGNIYTKKEAFNVENGNATPHLTQNAGVLTCSLSKRC

SEQ ID NO: 223 - protein, 514 aa, ARTIFICIAL SEQUENCE
  Synthetic
MAMKLIAPMAFLAMQLIIMAAVEDQSAQIMLDSVVEKYLRSNRSLRKVEHSRHDAINIFNVEKYGAVGDGKHDCTEAFSTAWQAACKNPSAMLLVPGSKKFVVNNLFFNGPCQPHFTFKVDGIIAAYQNPASWKNNRIWLQFAKLTGFTLMGKGVIDGQGKQWWAGQCKWVNGREICNDRDRPTAIKFDFSTGLIIQGLKLMNSPEFHLVFGNCEGVKIIGISITAPRDSPNTDGIDIFASKNFHLQKNTIGTGDDCVAIGTGSSNIVIEDLICGPGHGISIGSLGRENSRAEVSYVHVNGAKFIDTQNGLRIKTWQGGSGMASHIIYENVEMINSENPILINQFYCTSASACQNQRSAVQIQDVTYKNIRGTSATAAAIQLKCSDSMPCKDIKLSDISLKLTSGKIASCLNDNANGYFSGHVIPACKNLSPSAKRKESKSHKHPKTVMVENMRAYDKGNRTRILLGSRPPNCTNKCHGCSPCKAKLVIVHRIMPQEYYPQRWICSCHGKIYHP

SEQ ID NO: 224 - protein, 852 aa, ARTIFICIAL SEQUENCE
  Synthetic
EDNPIDSCWRGDSNWAQNRMKLADCAVGFGSSTMGGKGGDLYTVTNSDDDPVNPAPGTLRYGATRDRPLWIIFSGNMNIKLKMPMYIAGYKTFDGRGAQVYIGNGGPCVFIKRVSNVIIHGLHLYGCSTSVLGNVLINESFGVEPVHPQDGDALTLRTATNIWIDHNSFSNSSDGLVDVTLSSTGVTISNNLFFNHHKVMLLGHDDAYSDDKSMKVTVAFNQFGPNCGQRMPRARYGLVHVANNNYDPWTIYAIGGSSNPTILSEGNSFTAPNESYKKQVTIRIGCKTSSSCSNWVWQSTQDVFYNGAYFVSSGKYEGGNIYTKKEAFNVENGNATPQLTKNAGVLTCSLSKRCGPGPGLEDQSAQIMLDSVVEKYLRSNRSLRKVEHSRHDAINIFNVEKYGAVGDGKHDCTEAFSTAWQAACKNPSAMLLVPGSKKFVVNNLFFNGPCQPHFTFKVDGIIAAYQNPASWKNNRIWLQFAKLTGFTLMGKGVIDGQGKQWWAGQCKWVNGREICNDRDRPTAIKFDFSTGLIIQGLKLMNSPEFHLVFGNCEGVKIIGISITAPRDSPNTDGIDIFASKNFHLQKNTIGTGDDCVAIGTGSSNIVIEDLICGPGHGISIGSLGRENSRAEVSYVHVNGAKFIDTQNGLRIKTWQGGSGMASHIIYENVEMINSENPILINQFYCTSASACQNQRSAVQIQDVTYKNIRGTSATAAAIQLKCSDSMPCKDIKLSDISLKLTSGKIASCLNDNANGYFSGHVIPACKNLSPSAKRKESKSHKHPKTVMVENMRAYDKGNRTRILLGSRPPNCTNKCHGCSPCKAKLVIVHRIMPQEYYPQRWICSCHGKIYHP

SEQ ID NO: 225 - protein, 225 aa, ARTIFICIAL SEQUENCE
  Synthetic
MAKVSDLALLLVAGMAISLYIQETGAVKFDIKNQCGYTVWAAGLPGGGQQLTQGQTWTVNLAAGTQSARFWGRTGCSFDASGKGTCQTGDCGGQLSCTVSGAVPATLAEYTQSDQDYYDVSLVDGFNIPLSINPTNAQCTAPACKADVNAVCPAELKVDGGCKSACAAFQTDQYCCTGTYANSCPATNYSMIFKNQCPQAYSYPKDDTATFACPSGTDYSIVFCP

SEQ ID NO: 226 - protein, 281 aa, ARTIFICIAL SEQUENCE
  Synthetic
MGIMATQNSKSNIFWSSSASVVLVLLLLVDVGVCQNCGCNGLCCSQYGYCGSGEAYCGAGCKEGPCSSSSPPSTGTGVGSIVSSDVFNSIVGGAASGCAGNGFYTYDSFISAANAFNGFGTSGSSDVNKREIAAFFANAAHETGGFCYIEEQNPTSIYCDASNTQYPCASGKTYHGRGPLQLSWNYNYGAAGSYIQFDGLNNPEIVGTDSTISFKTAVWFWMVNSNCHTAITSGQGFGATIRAINSMECDGGNAATVASRVNYYQKFCQQLNVDTGSALQC

SEQ ID NO: 227 - protein, 306 aa, ARTIFICIAL SEQUENCE
  Synthetic
MGGSRVLIIGGTGYIGRHVTNASLAQGHPTFLLVREITPSNPEKAQLLESFTSKGATLVQGSIDDHASLVAALKKVDVVISTLGAPQIADQFNLIKAIKEVGTIKRFFPSEFGNDVDKHHAVEPMKSMFDLKIKLRRTIEAEGIPHTYVVPHCFAGYFLTNLAQLGLAAPPRDKIVIYGDGTTKAVYMKEEDIGTFTIKAVDDPRTLNKTLYLKPPANTISTNDLVALWEAKIGKTLEKVYLSEEQVLKLLQDTPFPGTFMVSIFHTIYVKGDQTNFQIGPDGVEASALYPDVKYTTVEEYISAFV

SEQ ID NO: 228 - protein, 165 aa, ARTIFICIAL SEQUENCE
  Synthetic
MAMRMKSSSMSSYRFSYCQMMLVLMVMTLVQIGAAQSDTNSCVNSLVPCASYLNATTKPPDSCCVPLLNVIQTQQQCLCNLLNSSIVKQSSINITQALNIPRLCGDTNVSTDACSTNATANAPSASTTPSVPADTGDSSGIGATSLQIFLPLLAVFFLGVFKSFP

SEQ ID NO: 229 - protein, 472 aa, ARTIFICIAL SEQUENCE
  Synthetic
MARRLCSFLLSFLIIVSVWAENSKFARLNLASFTWKDAEDNKNCSAGELETSSLSVMHIQGKCSPFRLLNSSWWTAVSESIKGDTARYRAMVKGGWSAGKTMVNPQEDADIPLASGQAESSSNYIIKLGFGTPPQSFYTVLDTGSNIAWIPCNPCSGCSSKQQPFEPSKSSTYNYLTCASQQCQLLRVCTKSDNSVNCSLTQRYGDQSEVDEILSSETLSVGSQQVENFVFGCSNAARGLIQRTPSLVGFGRNPLSFVSQTATLYDSTFSYCLPSLFSSAFTGSLLLGKEALSAQGLKFTPLLSNSRYPSFYYVGLNGISVGEELVSIPAGTLSLDESTGRGTIIDSGTVITRLVEPAYNAMRDSFRSQLSNLTMASPTDLFDTCTNRPSGDVEFPLITLHFDDNLDLTLPLDNILYPGNDDGSVLCLAFGLPPGGGDDVLSTFGNYQQQKLRIVHDVAESRLGIASGNCDG

SEQ ID NO: 230 - protein, 348 aa, ARTIFICIAL SEQUENCE
  Synthetic
MELLKQHRYMFLLISCIVILLNSMHADCEQIGVNYGMDGNNLPSAGDVVSLMKKNNIGKMRIFGPNADVLRAFANSRIEVIVGVENKGLEAVASSQDSANGWVNDNIKPFYPSTNIKYIAVGNEVLEMPDNAQYVSFLVPAIKNIQTALENANLQNNIKVSTAHAMTVIGTSSPPSKGTFKDAVKDSMSSILQFLQDHGSPFMANVYPYFSYDGDRSIKLDYALFNPTPPVVDEGLSYTNLFDAMVDAVLSAMESLGHPNIPIVITESGWPSAGKSVATIENAQTYNNNLIKHVLSNAGTPKRPGSSIETYIFALFNENLKGPAEVEKHFGLFNPDEQPVYPVKFSLN

SEQ ID NO: 231 - protein, 375 aa, ARTIFICIAL SEQUENCE
  Synthetic
MASCTLLAVLVFLCAIVSCFSDNPIDSCWRGDANWDQNRMKLADCAVGFGSSAMGGKGGAFYTVTSSDDDPVNPAPGTLRYGATRERSLWIIFSKNLNIKLNMPLYIAGNKTIDGRGAEVHIGNGGPCLFMRTVSHVILHGLNIHGCNTSVSGNVLISEASGVVPVHAQDGDAITMRNVTDVWIDHNSLSDSSDGLVDVTLASTGVTISNNHFFNHHKVMLLGHSDIYSDDKSMKVTVAFNQFGPNAGQRMPRARYGLIHVANNNYDPWSIYAIGGSSNPTILSEGNSFTAPNDSDKKEVTRRVGCESPSTCANWVWRSTQDSFNNGAYFVSSGKNEGTNIYNNNEAFKVENGSAAPQLTKNAGVLTCILSKPCS

SEQ ID NO: 232 - protein, 367 aa, ARTIFICIAL SEQUENCE
  Synthetic
MASPCLIAVLVFLCAIVSCYSDNPIDSCWRGDSNWDQNRMKLADCAVGFGSSTMGGKGGDFYTVTSTDDNPVNPTPGTLRYGATREKALWIIFSQNMNIKLKMPLYVAGHKTIDGRGADVHLGNGGPCLFMRKVSHVILHSLHIHGCNTSVLGDVLVSESIGVEPVHAQDGDAITMRNVTNAWIDHNSLSDCSDGLIDVTLGSTGITISNNHFFNHHKVMLLGHDDTYDDDKSMKVTVAFNQFGPNAGQRMPRARYGLVHVANNNYDPWNIYAIGGSSNPTILSEGNSFTAPSESYKKEVTKRIGCESPSACANWVWRSTRDAFINGAYFVSSGKTEETNIYNSNEAFKVENGNAAPQLTKNAGVVT

SEQ ID NO: 233 - protein, 367 aa, ARTIFICIAL SEQUENCE
  Synthetic
MASPCLIAFLVFLCAIVSCCSDNPIDSCWRGDSNWGQNRMKLADCAVGFGSSTMGGKGGDFYTVTSADDNPVNPTPGTLRYGATREKTLWIIFSQNMNIKLKMPLYVAGHKTIDGRGADVHLGNGGPCLFMRKVSHVILHGLHIHGCNTSVLGDVLVSESIGVVPVHAQDGDAITMRNVTNAWIDHNSLSDCSDGLIDVTLGSTGITIFNNHFFNHHKVMLLGHDDTYDDDKSMKVTVAFNQFGPNAGQRMPRARYGLVHVANNNYDPWNIYAIGGSSNPTILSEGNSFTAPNENYKYEVTKRIGCESTSACANWVWRSTRDAFSNGAYFVSSGKIEETNIYNSNEAFKVENGNAAPQLTKNAGVVA

SEQ ID NO: 234 - protein, 367 aa, ARTIFICIAL SEQUENCE
  Synthetic
MASPCLVAVLVFLCAIVSCYSDNPIDSCWRGDSNWDQNRMKLADCVVGFGSLTMGGKGGEIYTVTSSDDNPVNPTPGTLRYGATREKALWIIFSQNMNIKLQMPLYVAGYKTIDGRGADVHLGNGGPCLFMRTASHVILHGLHIHGCNTSVLGDVLVSESIGVEPVHAQDGDAITMRNVTNAWIDHNSLSDCSDGLIDVTLGSTGITISNNHFFNHHKVMLLGHDDTYDDDISMKVTVAFNQFGPNAGQRMPRARYGLVHVANNNYDQWNIYAIGGSSNPTILSEGNSPTAPSESYKKEVTKRIGCESTSACANWVWRFTRDAFTNGAYFVSSGKAEETNIYNSNEAFKVENGNAAPQLTQNAGVVT

SEQ ID NO: 235 - protein, 366 aa, ARTIFICIAL SEQUENCE
  Synthetic
MASPCLRAVLVFLCAIVSCYSDNPIDSCWRGDSNWGQNRMKLADCVVGFGSSTMGGKGGEFYTVTSAEDNPVNPTPGTLRYGATREKALWIIFSQNMNIKLKMPLYVAGHKTIDGRGADVHLGNGGPCLFMRKVSHVILHGLHIGCNTSVLGDVLVSESIGVEPVHAQDGDAITMRNVTNAWIDHNSLSDCSDGLIDVTLGSTGITISNNHFFNHHKVMLLGHDDTYDNDKSMKVTVAFNQFGPNAGQRMPRARYGLVHVANNNYDPWNIYAIGGSSNPTILSEGNSFTAPSESYKKEVTKRIGCESTSACANWVWRSTRDAFTNGAYFVSSGKIEETNIYNSNEAFKVENGNAAPQLTKNAGVVT

SEQ ID NO: 236 - protein, 367 aa, ARTIFICIAL SEQUENCE
  Synthetic
MDSPCLIAVLVFLCAIVSCYSDNPIDSCWRGDSNWDQNRMKLADCAVGFGSSTMGGKGGDIYTVTSAEDNPVNPTPGTLRYGATREKALWIIFSQNMNIKLKMPLYVAGHKTIDGRGADVHLGNGGPCLFMRKVSHVILHGLHIHGCNTSVLGNVLVSESIGVEPVHAQDGDAITMRNVTNAWIDHNSLSDCSDGLIDVTLSSTGITISNNHFFNHHKVMLLGHDDTYDDDKSMKVTVAFNQFGPNAGQRMPRARYGLVHVANNNYDQWNIYAIGGSSNPTILSEGNSFAAPNENYKKEVTKRIGCVSTSACANWVWRSTRDAFSNGAYFVSSGKTEETNIYTSNEAFKVENGNLAPQLTKNAGVVA

SEQ ID NO: 237 - protein, 514 aa, ARTIFICIAL SEQUENCE
  Synthetic
MGMKFMAAVAFLALQLIVMAAAEDQSAQIMLDSDIEEYLRSNRSLKKLVHSRHDAATVFNVEQYGAVGDGKHDSTEAFATTWNAACKKASAVLLVPANKKFFVNNLVFRGPCQPHLSFKVDGTIVAQPDPARWKNSKIWLQFAQLTDFNLMGTFVIDGQGQQWWAGQCKVVNGRTVCNDRNRPTAIKIDYSKSVTVKELTLMNSPEFHLVFGECEGVKIQGLKIKAPRDSPNTDGIDIFASKRFHIEKCVIGTGDDCIAIGTGSSNITIKDLICGPGHGISIGSLGRDNSRAEVSHVHVNRAKFIDTQNGLRIKTWQGGSGLASYITYENVEMINSENPILINQFYCTSASACQNQRSAVQIQGVTYKNIHGTSATAAAIQLMCSDSVPCTGIQLSNVSLKLTSGKPASCVDKNARGFYSGRLIPTCKNLRPGPSPKEFELQQQPTTVMDENKGACAKGDSTCISLSSSPPNCKNKCKGCQPCKPKLIIVHPNKPQDYYPQKWVCSCHNKIYNP

SEQ ID NO: 238 - protein, 507 aa, ARTIFICIAL SEQUENCE
  Synthetic
MSMKFMAALAFLALQLIVMAAGEDQSAQIMLDSDTKQYHRSSRNLRKAVHHARHDVAIVFNVEHYGAVGDGKHDSTDAFEKTWNAACNKLSAVFLVPANKKFVVNNLVFYGPCQPHFSFKVDGTIAAYPDPAKWLNSKIWMHFARLTDFNLMGTGVIDGQGNRWWSDQCKTINGRTVCNDKGRPTAIKIDFSKSVTVKELTLTNSPEFHLVFGECDGVKIQGIKIKAPRDSPNTDGIDIFASKRFEIEKCTIGTGDDCVAVGTGSSNITIKDLTCGPGHGMSIGSLGKGNSRSEVSFVHLDGAKFIDTQNGLRIKTWQGGSGLASHITYENVEMINAENPILINQFYCTSAAACKNQRSAVKIQDVTFKNIHGTSATTAAIQLMCSDSVPCSNIKLSNVFLKLTSGKVATCVNKNANGYYTNPLNPSCKSLHPGRTPKELELHQKPTTLLMDEKMGASLNSSPPNCKNKCKGCQPCKPKLIIVHPNQPEDYYPQRWVCSCHNKIYNP

SEQ ID NO: 239 - protein, 384 aa, ARTIFICIAL SEQUENCE
  Synthetic
HDVAIVFNVEHHGAVGDGNHDSTDAFEKTWNEACKTLSAVFLVPANKKFVVVNNLVFYGPCQPHFSPKVDGIIAAYPDPVKWKNSKIWMHFARLTDFNLMGTGVIDGQGSKWWSDQCKTVNGRTVCNDKGRPTAIKIDFSKSVTVKELTLMNSPEFHLVFGECDGVKIQGIKIKAPKESPNTDGIDIFGSKRFEIEKCIIGTGDDCVAIGTGSSNITITDLTCGPGHGMSIGSLGKGNSRSEVSFVHLDGAKFIDTQNGLRIKTWQGGSGLASHITYENVEMVNAENPILINQFYCTSAACENQRSAVKIEDVWFKNIHGTSATAAAIQLMCSDSVPCSNIKLSNVVLKLSSGKVAACVNKNANGYYTNPLNPPCKSLHPGPTP

SEQ ID NO: 240 - protein, 225 aa, ARTIFICIAL SEQUENCE
  Synthetic
MARVSELAFLLAATLAISLHMQEAGVVKFDIKNQCGYTVWAAGLPGGGKRLDQGQTWTVNLAAGTASARFWGRTGCTFDASGKGSCQTGDCGGQLSCTVSGAVPATLAEYTQSDQDYYDVSLVDGFNIPLAINPTNAQCTAPACKADINAVCPSELKVDGGCNSACNVFKTDQYCCRNAYVDNCPATNYSKIFKNQCPQAYSYAKDDTATFACASGTDYSIVFCP

SEQ ID NO: 241 - protein, 225 aa, ARTIFICIAL SEQUENCE
  Synthetic
MARVSELALLLVATLAISLHMQEAGAVKFDIKNQCGYTVWAAGLPGGGKRLDQGQTWTLNLAAGTASARFWGRTGCTFDASGKGSCKTGDCGGQLSCTVSGAVPATLAEYTQSDQDYYDVSLVDGFNIPLAINPTNAQCTAPACKADINAVCPSELKVEGGCNSACNVFQTDQYCCRNAYVDNCPATNYSKIFKNQCPQAYSYAKDDTATFACASGTDYSIVFCP

SEQ ID NO: 242 - protein, 224 aa, ARTIFICIAL SEQUENCE
  Synthetic
MARVSELALLLVATLAISLHMQEAGAVKFDIKNQCGYTVWAAGLPGGGKRLDQGQTWTVNLAAGTASARFWGRTGCTFDASGKGSCRSGDCGGQLSCTVSGAVPATLAEYTQSDKDYYDVSLVDGFNIPLAINPTNTKCTAPACKADINAVCPSELKVDGGCNSACNVLQTDQYCCRNAYVDNCPATNYSKIFKNQCPQAYSYAKDDTATFACASGTDYSIVFC

SEQ ID NO: 243 - protein, 199 aa, ARTIFICIAL SEQUENCE
  Synthetic
VKFDIKNQCGYTVWAAGLPGGGKEFDQGQTWTVNLAAGTASARFWGRTGCTFDASGKGSCRSGDCGGQLSCTVSGAVPATLAEYTQSDQDYYDVSLVDGFNIPLAINPTNTKCTAPACKADINAVCPSELKVDGGCNSACNVLQTDQYCCRNAYVNNCPATNYSKIFKNQCPQAYSYAKDDTATFACASGTDYSIVFCP

SEQ ID NO: 244 - protein, 274 aa, ARTIFICIAL SEQUENCE
  Synthetic
MGNSSGNSLMVLLLVLLLVGVTVNAQNCGCASGLCCSQYGYCGSSSAYCGAGCKSGPCSGGGSPSGGGGSVGTIISQSFFNGLAGGAASSCEGKGFYTYNAFIAAANAYSGFGTTGSADVTKRELAAFLANVMHGTGGMCYINERTPPMIYCMSSATWPCASGKSYHGRGPLQLSWNYNYGAAGQSIGFDGVNNPEKVGQDSTISFKTAVWFWMKNSNCHSAITSGQGFGGTIKAINSQECNGGNSGEVNSRVNYYKNICSQLGVDPGANLSCH

SEQ ID NO: 245 - protein, 277 aa, ARTIFICIAL SEQUENCE
  Synthetic
MGKTGGEKWVMALVLVLLLLGVSVNAQNCGCASGLCCSKYGYCGTTSAYCGTGCRSGPCSSNSGGGSPSGGGGSVGTIISQSIFNGLAGGAASSCEGKGFYTYTAFIKAASAYSGFGTTGSNDVKKRELAAFFANVMHETGGLCYINERNPPMIYCNSSSTWPCASGKSYHGRGPLQLSWNYNYGAAGKSIGFDGLNNPEKVGQDATISFKTAVWFWMNNSNCHSAITGGQGFGATIKAINSGECNGGNSGEVSSRVNYYRKICSQLGVDPGANVSC

SEQ ID NO: 246 - protein, 308 aa, ARTIFICIAL SEQUENCE
  Synthetic
MGSRSRILLIGATGYIGRHVAKASLDLGHPTFLLVRESTASSNSEKAQLLESFKASGANIVHGSIDDHASLVEAVKNVDVVISTVGSLQIESQVNIIKAIKEVGTVKRFFPSEFGNDVDNVHAVEPAKSVFEVKAKVRRAIEAEGIPYTYVSSNCFAGYFLRSLAQAGLTAPPRDKVVILGDGNARVVFVKEEDIGTFTIKAVDDPRTLNKTLYLRLPANTLSLNELVALWEKKIDKTLEKAYVPEEEVLKLIADTPFPANISIAISHSIFVKGDQTNFEIGPAGVEASQLYPDVKYTTVDEYLSNFV

SEQ ID NO: 247 - protein, 173 aa, ARTIFICIAL SEQUENCE
  Synthetic
MDSRRLKRSGIVCMVLMSMLMLVVCEDSDNTACLSSLSSCAPYLNATTKPDSSCCSALISVIDKDSQCLCNLLNSDTVKQLGVNVTQAMKMPAECGKNVSATQCNKTATSGGSSVGKTPTSTPPPSSATPSTTTITKSNSNAAASVSVKMFPVAALVFVAVASVLGLKGPCLR

SEQ ID NO: 248 - protein, 124 aa, ARTIFICIAL SEQUENCE
  Synthetic
MRRERGRQGDSSSCERQVDRVNLKPCEQHIMQRIMGEQEQYDSYDIRSTRSSDQQQRCCDELNEMENTQRCMCEALQQIMENQCDRLQDRQMVQQFKRELMNLPQQCNFRAPQRCDLDVSGGRC

SEQ ID NO: 249 - protein, 157 aa, ARTIFICIAL SEQUENCE
  Synthetic
MGVFTFEDEITSTVPPAKLYNAMKDADSITPKIIDDVKSVEIVEGNGGPGTIKKLTIVEDGETKFILHKVESIDEANYAYNYSVVGGVALPPTAEKITFETKLVEGPNGGSIGKLTLKYHTKGDAKPDEEELKKGKAKGEGLFRAIEGYVLANPTQY

SEQ ID NO: 250 - protein, 92 aa, ARTIFICIAL SEQUENCE
  Synthetic
ISCGQVNSALAPCIPFLTKGGAPPPACCSGVRGLLGALRTTADRQAACNCLKAAAGSLRGLNQGNAAALPGRCGVSIPYKISTSTNCATIKF

1. An improved LAMP Construct comprising:
a. a Cysteine Conserved Fragment of a LAMP Protein; and
b. at least one Allergen X (SEQ ID NO:Y) as described in Table 1/FIG. 14.

2. The improved LAMP Construct of claim 1, wherein:
a. Allergen X (SEQ ID NO:Y) is placed at the N-terminus of the Cysteine Conserved Fragment;
b. Allergen X (SEQ ID NO:Y) is place at the C-terminus of a single Cysteine Conserved Fragment; or
c. Allergen X (SEQ ID NO:Y) is placed in between two Cysteine Conserved Fragments.

3. The improved LAMP Construct of claim 1, wherein the improved LAMP Construct comprises at least one of Allergen X (SEQ ID NO:Y) of Table 1/FIG. 14, and preferably is constructed as depicted in ILC-1, ILC-2, ILC-3, ILC-4, ILC-5 or ILC-6.

4. The improved LAMP Construct of claim 3, wherein each Allergen X (SEQ ID NO:Y) is separated by a linker.

5. The improved LAMP Construct of claim 4, wherein the linker is selected from the amino acid sequence GPGPG or PMGLP.

6. The improved LAMP Construct of claim 1, wherein the improved LAMP Construct comprises more than one Cysteine Conserved Fragment.

7. The improved LAMP Construct of claim 1, wherein the Cysteine Conserved Fragment comprises a Homology Domain of a LAMP Protein.

8. The improved LAMP Construct of claim 1, wherein the improved LAMP Construct further comprises a Transmembrane Domain of a LAMP Protein.

9. The improved LAMP Construct of claim 1, wherein the improved LAMP Construct further comprises a signal sequence.

10. The improved LAMP Construct of claim 9, wherein the signal sequence is derived from a LAMP Protein.

11. The improved LAMP Construct of claim 1, wherein the LAMP protein is selected from LAMP-1, LAMP2, LAMP-3, LIMP 2, Macrosailin, Endolyn, LAMP5 or LIMBIC.

12. The improved LAMP Construct of claim 11, wherein the LAMP Protein is selected from any one of SEQ ID NO:1-250 and/or the Allergen X is selected from any one of SEQ ID NO:Y.

13. The improved LAMP Construct of claim 12, wherein the LAMP Protein is at least about 70%, at least about 75%, at least about 80%, at least about 85%, at least about 90%, at least about 95%, 96%, 97%, 98% or 99% identical to SEQ ID NO:1-113 and/or the Allergen X is at least about 70%, at least about 75%, at least about 80%, at least about 85%, at least about 90%, at least about 95%, 96%, 97%, 98% or 99% identical to SEQ ID NO:Y.

14. A polynucleotide encoding the improved LAMP Construct of claim 1.

15. A host cell comprising the polynucleotide of claim 14.

16. A composition comprising the improved LAMP Construct of claim 1.

17. A method of treating an allergic response in a subject in need thereof, wherein the method comprises administering to a subject the improved LAMP Construct of claim 1 in an amount sufficient to reduce or treat the disease or disorder.

18. The method of claim 17, wherein the method comprises a priming step and at least one boosting step.

19. The method of claim 18, wherein the improved LAMP Construct of any one of claims 1-13, the polynucleotide of claim 14, the host cell of claim 15, or the composition of claim 16 is used in the priming step.

20. The method of claim 18, wherein the boosting step comprises administration of Allergen X, an improved LAMP Construct, a polypeptide encoded by an improved LAMP Construct, or a cell comprising the improved LAMP Construct.

21. The method of claim 17, wherein Allergen X used to prime is the same that is used to boost.

22. The method of claim 17, wherein Allergen X used to prime is derived from the same protein as a second Allergen X used to boost.

23. The method of claim 17, wherein more than one Allergen X is used to prime and/or boost.
